(19) United States
(12) Patent Application Publication
(10) Pub. No.: US 2022/0411514 A1
(43) Pub. Date: Dec. 29, 2022

(54) ANTI-GAL3 ANTIBODIES AND METHODS OF USE FOR INSULIN RESISTANCE

(71) Applicant: TrueBinding, Inc., Foster City, CA (US)

(72) Inventors: Dongxu Sun, Palo Alto, CA (US); Ragadeepthi Tunduguru, Foster City, CA (US); Dalya Rivka Rosner, Redwood City, CA (US); Ksenya Shchors, San Mateo, CA (US); Suhail Rasool, Foster City, CA (US)

(21) Appl. No.: 17/834,703

(22) Filed: Jun. 7, 2022

Related U.S. Application Data
(60) Provisional application No. 63/202,373, filed on Jun. 8, 2021.

(51) Int. Cl. C07K 16/28; A61P 3/10

(52) U.S. Cl. CPC C07K 16/2851; A61P 3/10; C07K 2317/76; C07K 2317/34; A61K 2039/505

(57) ABSTRACT

Disclosed herein are methods and compositions for disrupting an interaction between Galectin-3 and insulin receptor or glucose transporters. Further disclosed herein are methods and compositions for the treatment of a disease or a disorder in a subject, such as the treatment of diabetes mellitus, insulin resistance, chronic hyperinsulinemia, dysmetabolic syndrome, type A insulin resistance syndrome, type B insulin resistance syndrome, gestational diabetes, acanthosis nigricans, polycystic ovary syndrome (PCOS), obesity, muscle wasting, cardiovascular diseases, cardiac hypertrophy, myocardial ischemia, hypertension, pancreatic cancer associated diabetes (PCDM), rhabdomyosarcoma, or cancers.

### CROSS-REFERENCE TO RELATED APPLICATIONS

[0001] This application claims the benefit of priority of U.S. Provisional Patent Application 63/202,373, filed Jun. 8, 2021, which is hereby expressly incorporated by reference in its entirety.

### REFERENCE TO SEQUENCE LISTING

[0002] The present application is being filed along with a Sequence Listing in electronic format. The Sequence Listing is provided as a file entitled SeqListingIMMUT029A.TXT, which was created and last modified on Jun. 7, 2022, which is 1,984,217 bytes in size. The information in the electronic Sequence Listing is hereby incorporated by reference in its entirety.

### FIELD

[0003] Aspects of the present disclosure relate generally to antibodies or binding fragments thereof that block or disrupt the interaction between Galectin-3 (Gal3) and insulin receptor (INSR) or a glucose transporter, such as glucose transporter 1 (GLUT1) or glucose transporter 4 (GLUT4).

### BACKGROUND

[0004] Galectin-3 (Gal3, GAL3) is a lectin, or a carbohydrate-binding protein, with specificity towards beta-galactosides. In human cells, Gal3 is expressed and can be found in the nucleus, cytoplasm, cell surface, and in the extracellular space. Gal3 recognizes and interacts with beta-galactose conjugates on various proteins.

### SUMMARY

[0005] Aspects of the present disclosure relate generally to antibodies or binding fragments thereof that block or disrupt the interaction between Galectin-3 (Gal3) and insulin receptor (INSR) or a glucose transporter, such as glucose transporter 1 (GLUT1) or glucose transporter 4 (GLUT4). Further disclosed herein are methods and compositions for the treatment of diseases or disorders, such as (but not limited to) diabetes mellitus, insulin resistance, chronic hyperinsulinemia, dysmetabolic syndrome, type A insulin resistance syndrome, type B insulin resistance syndrome, gestational diabetes, acanthosis nigricans, polycystic ovary syndrome (PCOS), obesity, muscle wasting, cardiovascular diseases, cardiac hypertrophy, myocardial ischemia, hypertension, pancreatic cancer associated diabetes (PCDM), rhabdomyosarcoma, or cancers, which can be associated with INSR and/or GLUT dysfunction.

[0006] Galectin-3 (Gal3) has been implicated to have immunomodulatory activity. An example of this is the interaction between Gal3 and T-cell immunoglobulin and mucin-domain containing-3 (TIM-3), which causes suppression of immune responses such as T cell activation and may enable cancer cells to evade immune clearance. This phenomenon and methods to inhibit the same are exemplified in WO 2019/023247 and WO 2020/160156, each of which is hereby expressly incorporated by reference in its entirety.

[0007] Disclosed herein are anti-Gal3 antibodies or binding fragments thereof. In some embodiments, the antibodies or binding fragments thereof comprise a heavy chain variable region comprising a V_{H}-CDR1, a V_{H}-CDR2, and a V_{H}-CDR3; and a light chain variable region comprising a V_{L}-CDR1, a V_{L}-CDR2, and a V_{L}-CDR3. In some embodiments, the V_{H}-CDR1 comprises an amino acid sequence having at least 80%, 81%, 82%, 83%, 84%, 85%, 86%, 87%, 88%, 89%, 90%, 91%, 92%, 93%, 94%, 95%, 96%, 97%, 98%, 99%, or 100% identity to the amino acid sequence of SEQ ID NO: 32, 37, or 66. In some embodiments, the V_{H}-CDR2 comprises an amino acid sequence having at least 80%, 81%, 82%, 83%, 84%, 85%, 86%, 87%, 88%, 89%, 90%, 91%, 92%, 93%, 94%, 95%, 96%, 97%, 98%, 99%, or 100% identity to the amino acid sequence of SEQ ID NO: 801, 951, 952, 77, or 108. In some embodiments, the V_{H}-CDR3 comprises an amino acid sequence having at least 80%, 81%, 82%, 83%, 84%, 85%, 86%, 87%, 88%, 89%, 90%, 91%, 92%, 93%, 94%, 95%, 96%, 97%, 98%, 99%, or 100% identity to the amino acid sequence of SEQ ID NO: 953, 954, 802, 118, or 164. In some embodiments, the V_{L}-CDR1 comprises an amino acid sequence having at least 80%, 81%, 82%, 83%, 84%, 85%, 86%, 87%, 88%, 89%, 90%, 91%, 92%, 93%, 94%, 95%, 96%, 97%, 98%, 99%, or 100% identity to the amino acid sequence of SEQ ID NO: 171, 178, or 215. In some embodiments, the V_{L}-CDR2 comprises an amino acid sequence having at least 80%, 81%, 82%, 83%, 84%, 85%, 86%, 87%, 88%, 89%, 90%, 91%, 92%, 93%, 94%, 95%, 96%, 97%, 98%, 99%, or 100% identity to the amino acid sequence of SEQ ID NO: 222, 229, or 225. In some embodiments, the V_{L}-CDR3 comprises an amino acid sequence having at least 80%, 81%, 82%, 83%, 84%, 85%, 86%, 87%, 88%, 89%, 90%, 91%, 92%, 93%, 94%, 95%, 96%, 97%, 98%, 99%, or 100% identity to the amino acid sequence of SEQ ID NO: 257, 256, or 291.

[0008] In some embodiments, the heavy chain variable region of the anti-Gal3 antibody or binding fragment thereof comprises an amino acid sequence having at least 80%, 81%, 82%, 83%, 84%, 85%, 86%, 87%, 88%, 89%, 90%, 91%, 92%, 93%, 94%, 95%, 96%, 97%, 98%, 99%, or 100% identity to any one of the amino acid sequences of SEQ ID NOs: 806-820, 955-968, 1067-1109, or 1415-1439. In some embodiments, the light chain variable region of the anti-Gal3 antibody or binding fragment thereof comprises an amino acid sequence having at least 80%, 81%, 82%, 83%, 84%, 85%, 86%, 87%, 88%, 89%, 90%, 91%, 92%, 93%, 94%, 95%, 96%, 97%, 98%, 99%, or 100% identity to any one of the amino acid sequences of SEQ ID NOs: 821-835, 969-982, 1110-1152, or 1440-1464. In some embodiments, the anti-Gal3 antibody or binding fragment thereof comprises a heavy chain, wherein the heavy chain comprises an amino acid sequence having at least 80%, 81%, 82%, 83%, 84%, 85%, 86%, 87%, 88%, 89%, 90%, 91%, 92%, 93%, 94%, 95%, 96%, 97%, 98%, 99%, or 100% identity to any one of the amino acid sequences of SEQ ID NOs: 836-850, 983-996, 1411, 1153-1195, or 1465-1489. In some embodiments, the anti-Gal3 antibody or binding fragment thereof comprises a light chain, wherein the light chain comprises an amino acid sequence having at least 80%, 81%, 82%, 83%, 84%, 85%, 86%, 87%, 88%, 89%, 90%, 91%, 92%, 93%, 94%, 95%, 96%, 97%, 98%, 99%, or 100% identity to any one of the amino acid sequences of SEQ ID NOs: 851-865, 997-1010, 1196-1238, 1412 or 1490-1514.

[0009] Also disclosed herein are nucleic acids comprising a sequence having at least 80%, 81%, 82%, 83%, 84%, 85%, 86%, 87%, 88%, 89%, 90%, 91%, 92%, 93%, 94%, 95%, 96%, 97%, 98%, 99%, or 100% identity to any one of the nucleic acid sequences of SEQ ID NOs: 866-925, 1011-1066, 1239-1410, 1413-1414, or 1515-1614.

[0010] Also disclosed herein are methods of enhancing glucose transporter (GLUT) translocation in a cell. In some embodiments, the methods may comprise contacting the cell with an anti-Gal3 antibody or binding fragment thereof. In some embodiments, the glucose transporter is glucose transporter 1 (GLUT1) and/or glucose transporter 4 (GLUT4). In some embodiments, binding of the anti-Gal3 antibody or binding fragment thereof to Gal3 in the cell inhibits Gal3-mediated blocking of GLUT translocation. In some embodiments, the method is performed in vitro or in vivo. In some embodiments, GLUT translocation in the cell is enhanced by at least 50%, 55%, 60%, 65%, 70%, 75%, 80%, 85%, 90%, 95%, 100%, 105%, 110%, 115%, 120%, 125%, 130%, 135%, 140%, 145%, 150%, 155%, 160%, 165%, 170%, 175%, 180%, 185%, 190%, 195%, or 200% after contacting with the anti-Gal3 antibody or binding fragment thereof relative to a cell that is not contacted with the anti-Gal3 antibody or binding fragment thereof. In some embodiments, the anti-Gal3 antibody or binding fragment is any one or more of the anti-Gal3 antibodies or binding fragments thereof, or any portion or component of any one or more of the anti-Gal3 antibodies or binding fragments thereof disclosed herein, including but not limited to 1, 2, 3, 4, 5, or 6 CDRs, heavy chain variable regions, light chain variable regions, heavy chains, or light chains.

[0011] Also disclosed herein are methods of enhancing glucose transporter (GLUT) translocation in a cell. In some embodiments, the methods may comprise contacting the cell with a preincubated complex of Gal3 and an anti-Gal3 antibody or binding fragment thereof. In some embodiments, the glucose transporter is glucose transporter 1 (GLUT1) and/or glucose transporter 4 (GLUT4). In some embodiments, the method is performed in vitro or in vivo. In some embodiments, GLUT translocation in the cell is enhanced by at least 50%, 55%, 60%, 65%, 70%, 75%, 80%, 85%, 90%, 95%, 100%, 105%, 110%, 115%, 120%, 125%, 130%, 135%, 140%, 145%, 150%, 155%, 160%, 165%, 170%, 175%, 180%, 185%, 190%, 195%, or 200% after contacting with the preincubated complex of Gal3 and the anti-Gal3 antibody or binding fragment thereof relative to a cell that is not contacted with the preincubated complex of Gal3 and the anti-Gal3 antibody or binding fragment thereof. In some embodiments, the anti-Gal3 antibody or binding fragment is any one or more of the anti-Gal3 antibodies or binding fragments thereof, or any portion or component of any one or more of the anti-Gal3 antibodies or binding fragments thereof disclosed herein, including but not limited to 1, 2, 3, 4, 5, or 6 CDRs, heavy chain variable regions, light chain variable regions, heavy chains, or light chains.

[0012] Also disclosed herein are methods of improving insulin sensitivity in a subject in need thereof. In some embodiments, the methods may comprise administering to the subject an anti-Gal3 antibody or binding fragment thereof. In some embodiments, binding of the anti-Gal3 antibody or binding fragment thereof to Gal3 in the subject inhibits Gal3-mediated blocking of GLUT translocation in the subject, thereby improving insulin sensitivity in the subject. In some embodiments, the GLUT is glucose transporter 1 (GLUT1) and/or glucose transporter 4 (GLUT4). In some embodiments, the methods further comprise identifying the subject as needing improvement in insulin sensitivity prior to the administering step. In some embodiments, the methods further comprise detecting an improvement in insulin sensitivity in the subject following the administering step. In some embodiments, detecting the improvement in insulin sensitivity in the subject is done by measuring blood sugar levels, measuring blood insulin levels, glucose tolerance testing, or hyperinsulinemic euglycemic clamp. In some embodiments, the insulin sensitivity in the subject is improved by at least 50%, 55%, 60%, 65%, 70%, 75%, 80%, 85%, 90%, 95%, 100%, 105%, 110%, 115%, 120%, 125%, 130%, 135%, 140%, 145%, 150%, 155%, 160%, 165%, 170%, 175%, 180%, 185%, 190%, 195%, or 200% relative to the insulin sensitivity of the subject prior to the administering step. In some embodiments, the anti-Gal3 antibody or binding fragment is any one or more of the anti-Gal3 antibodies or binding fragments thereof, or any portion or component of any one or more of the anti-Gal3 antibodies or binding fragments thereof disclosed herein, including but not limited to 1, 2, 3, 4, 5, or 6 CDRs, heavy chain variable regions, light chain variable regions, heavy chains, or light chains.

[0013] Also disclosed herein are methods of improving insulin sensitivity in a subject in need thereof. In some embodiments, the methods may comprise administering to the subject a preincubated complex of Gal3 and an anti-Gal3 antibody or binding fragment thereof, thereby improving insulin sensitivity in the subject. In some embodiments, the GLUT is glucose transporter 1 (GLUT1) and/or glucose transporter 4 (GLUT4). In some embodiments, the methods further comprise identifying the subject as needing improvement in insulin sensitivity prior to the administering step. In some embodiments, the methods further comprise detecting an improvement in insulin sensitivity in the subject following the administering step. In some embodiments, detecting the improvement in insulin sensitivity in the subject is done by measuring blood sugar levels, measuring blood insulin levels, glucose tolerance testing, or hyperinsulinemic euglycemic clamp. In some embodiments, the insulin sensitivity in the subject is improved by at least 50%, 55%, 60%, 65%, 70%, 75%, 80%, 85%, 90%, 95%, 100%, 105%, 110%, 115%, 120%, 125%, 130%, 135%, 140%, 145%, 150%, 155%, 160%, 165%, 170%, 175%, 180%, 185%, 190%, 195%, or 200% relative to the insulin sensitivity of the subject prior to the administering step. In some embodiments, the anti-Gal3 antibody or binding fragment is any one or more of the anti-Gal3 antibodies or binding fragments thereof, or any portion or component of any one or more of the anti-Gal3 antibodies or binding fragments thereof disclosed herein, including but not limited to 1, 2, 3, 4, 5, or 6 CDRs, heavy chain variable regions, light chain variable regions, heavy chains, or light chains.

[0014] Also disclosed herein are methods of treating a disease associated with insulin resistance in a subject in need thereof. In some embodiments, the methods may comprise administering to the subject an anti-Gal3 antibody or binding fragment thereof, thereby treating the disease associated with insulin resistance in the subject. In some embodiments, the disease associated with insulin resistance comprises diabetes mellitus, chronic hyperinsulinemia, dysmetabolic syndrome, type A insulin resistance syndrome, type B insulin resistance syndrome, gestational diabetes, acanthosis nigricans, polycystic ovary syndrome (PCOS), obesity, muscle wasting, cardiovascular disease, cardiac hypertrophy, myocardial ischemia, hypertension, pancreatic cancer associated diabetes (PCDM), or cancer. In some embodiments, the methods further comprise identifying the subject as needing treatment of the disease associated with insulin resistance prior to the administering step. In some embodiments, the methods further comprise detecting an improvement in the disease associated with insulin resistance following the administering step. In some embodiments, detecting an improvement in the disease associated with insulin resistance comprises detecting an improvement in insulin sensitivity in the subject. In some embodiments, detecting the improvement in insulin sensitivity in the subject is done by measuring blood sugar levels, measuring blood insulin levels, glucose tolerance testing, or hyperinsulinemic euglycemic clamp. In some embodiments, the insulin sensitivity in the subject is improved by at least 50%, 55%, 60%, 65%, 70%, 75%, 80%, 85%, 90%, 95%, 100%, 105%, 110%, 115%, 120%, 125%, 130%, 135%, 140%, 145%, 150%, 155%, 160%, 165%, 170%, 175%, 180%, 185%, 190%, 195%, or 200% relative to the insulin sensitivity of the subject prior to the administering step. In some embodiments, the anti-Gal3 antibody or binding fragment is any one or more of the anti-Gal3 antibodies or binding fragments thereof, or any portion or component of any one or more of the anti-Gal3 antibodies or binding fragments thereof disclosed herein, including but not limited to 1, 2, 3, 4, 5, or 6 CDRs, heavy chain variable regions, light chain variable regions, heavy chains, or light chains.

[0015] Also disclosed herein are methods of treating a disease associated with insulin resistance in a subject in need thereof. In some embodiments, the methods may comprise administering to the subject a preincubated complex of Gal3 and an anti-Gal3 antibody or binding fragment thereof, thereby treating the disease associated with insulin resistance in the subject. In some embodiments, the disease associated with insulin resistance comprises diabetes mellitus, chronic hyperinsulinemia, dysmetabolic syndrome, type A insulin resistance syndrome, type B insulin resistance syndrome, gestational diabetes, acanthosis nigricans, polycystic ovary syndrome (PCOS), obesity, muscle wasting, cardiovascular disease, cardiac hypertrophy, myocardial ischemia, hypertension, pancreatic cancer associated diabetes (PCDM), or cancer. In some embodiments, the methods further comprise identifying the subject as needing treatment of the disease associated with insulin resistance prior to the administering step. In some embodiments, the methods further comprise detecting an improvement in the disease associated with insulin resistance following the administering step. In some embodiments, detecting an improvement in the disease associated with insulin resistance comprises detecting an improvement in insulin sensitivity in the subject. In some embodiments, detecting the improvement in insulin sensitivity in the subject is done by measuring blood sugar levels, measuring blood insulin levels, glucose tolerance testing, or hyperinsulinemic euglycemic clamp. In some embodiments, the insulin sensitivity in the subject is improved by at least 50%, 55%, 60%, 65%, 70%, 75%, 80%, 85%, 90%, 95%, 100%, 105%, 110%, 115%, 120%, 125%, 130%, 135%, 140%, 145%, 150%, 155%, 160%, 165%, 170%, 175%, 180%, 185%, 190%, 195%, or 200% relative to the insulin sensitivity of the subject prior to the administering step. In some embodiments, the anti-Gal3 antibody or binding fragment is any one or more of the anti-Gal3 antibodies or binding fragments thereof, or any portion or component of any one or more of the anti-Gal3 antibodies or binding fragments thereof disclosed herein, including but not limited to 1, 2, 3, 4, 5, or 6 CDRs, heavy chain variable regions, light chain variable regions, heavy chains, or light chains.

### BRIEF DESCRIPTION OF THE DRAWINGS

[0016] In addition to the features described above, additional features and variations will be readily apparent from the following descriptions of the drawings and exemplary embodiments. It is to be understood that these drawings depict typical embodiments and are not intended to be limiting in scope.

[0017] FIG. 1 demonstrates the ability of galectin-3 targeted antibodies to block the binding of Gal3 and Insulin Receptor (INSR) as measured by enzyme-linked immunosorbent assay (ELISA) at 10, 3, and 1 μg/mL. Bars represent mean+/−standard deviation.

[0018] FIG. 2 depicts titrations of a limited series of galectin-3 targeted antibodies to block Gal3 and Insulin Receptor (INSR) binding as measured by enzyme-linked immunosorbent assay (ELISA). Bars represent mean+/−standard deviation.

[0019] FIG. 3A depicts a summary of properties for exemplary anti-Gal3 antibodies.

[0020] FIG. 3B depicts the identification of Gal3-binding antibody bins by antibody competition. Values represent inhibition as assessed by biolayer interferometry.

[0021] FIG. 4 demonstrates the reduction of weight gain in mice fed with a normal diet or with 60% high fat diet (HFD) for 8 weeks and dosed with Isotype control antibody HuIgG4, or with Gal3-targeted TB001 (IMT001-4). Left panel depicts mean absolute values, and right panel depicts mean percent change per animal+/−standard error.

[0022] FIG. 5 depicts glucose tolerance in mice treated as in FIG. 4. Left panel depicts serum mean glucose levels after glucose bolus; right panel depicts mean area under curve (AUC) from data as represented in the left panel+/1 standard error.

[0023] FIG. 6 depicts insulin resistance in mice as treated in FIG. 4. Left panel depicts serum mean glucose levels after insulin bolus; right panel depicts mean area over curve (AOC) from data as represented in the left panel+/1 standard error.

[0024] FIG. 7 depicts hematoxylin and eosin staining of formalin fixed paraffin embedded liver sections from mice as treated in FIG. 4. Note the evidence of steatosis in HFD-fed mice treated with control IgG4 and absence thereof in those treated with IMT001-4 (TB001).

[0025] FIG. 8 depicts serum liver enzyme ALT levels in mice treated as in FIG. 4. Bars represent mean+/−standard error.

[0026] FIG. 9 depicts the amounts of circulating Gal3 in Bks-db or C57BL6/J control mice.

[0027] FIG. 10 depicts a Kaplan-Meier curve of healthy C57BL6/J mice and db/db mice treated with the anti-Gal3 antibody mTB001, a PBS negative control, or a semaglutide positive control.

[0028] FIG. 11 depicts the change in levels of fasting blood glucose of healthy C57BL6/J mice or db/db mice treated with either mTB001 or PBS.

[0029] FIG. 12 depicts the mean survival of NOD/ShiLtJ mice treated with mTB001 compared to untreated control.

[0030] FIG. 13A depicts the change in levels of fasting blood glucose of NOD/ShiLtJ mice treated with mTB001 compared to untreated control.

[0031] FIG. 13B depicts the circulating levels of C-peptide in NOD/ShiLtJ mice treated with mTB001 compared to untreated control, and in normal control mice.

[0032] FIG. 14 depicts primers used for RT-qPCR for quantifying inflammatory cytokines in an inflammatory bowel disease (IBD) mouse model.

[0033] FIG. 15 depicts the measured colon length in DSS-induced IBD mice treated with mTB001 or PBS compared to normal mice.

[0034] FIG. 16 depicts the quantification of circulating IFN-γ in DSS-induced IBD mice treated with mTB001 (10 mg/kg and 1 mg/kg) or PBS compared to normal mice.

[0035] FIG. 17 depicts protein sequences of Gal3, insulin receptor (INSR), glucose transporter 4 (GLUT4), and glucose transporter 1 (GLUT1).

[0036] FIG. 18 depicts peptide sequences of Gal3 used to generate and analyze antibodies.

[0037] FIG. 19A depicts exemplary variable heavy chain complementarity-determining region (CDR) 1 for anti-Gal3 antibodies disclosed herein. In some embodiments, any of the compositions or methods provided herein can include one or more of the variable heavy chain CDR1 provided herein.

[0038] FIG. 19B depicts exemplary variable heavy chain CDR2 for anti-Gal3 antibodies disclosed herein. In some embodiments, any of the compositions or methods provided herein can include one or more of the variable heavy chain CDR2 provided herein.

[0039] FIG. 19C depicts exemplary variable heavy chain CDR3 for anti-Gal3 antibodies disclosed herein. In some embodiments, any of the compositions or methods provided herein can include one or more of the variable heavy chain CDR3 provided herein.

[0040] FIG. 20A depicts exemplary variable light chain CDR1 for anti-Gal3 antibodies disclosed herein. In some embodiments, any of the compositions or methods provided herein can include one or more of the variable light chain CDR1 provided herein.

[0041] FIG. 20B depicts exemplary variable light chain CDR2 for anti-Gal3 antibodies disclosed herein. In some embodiments, any of the compositions or methods provided herein can include one or more of the variable light chain CDR2 provided herein.

[0042] FIG. 20C depicts exemplary variable light chain CDR3 for anti-Gal3 antibodies disclosed herein. In some embodiments, any of the compositions or methods provided herein can include one or more of the variable light chain CDR3 provided herein.

[0043] FIG. 21 depicts exemplary heavy chain variable region (VH) sequences for anti-Gal3 antibodies disclosed herein. In some embodiments, any of the compositions or methods provided herein can include one or more of the VH sequences provided herein.

[0044] FIG. 22 depicts exemplary light chain variable region (VL) sequences for anti-Gal3 antibodies disclosed herein. In some embodiments, any of the compositions or methods provided herein can include one or more of the VL sequences provided herein.

[0045] FIG. 23 depicts exemplary combinations of heavy and light chain CDRs (CDR1, CDR2, and CDR3) of exemplary anti-Gal3 antibodies disclosed herein. In some embodiments, any of the compositions or methods provided herein can include one or more of the heavy and light chain CDR combinations provided herein.

[0046] FIG. 24 depicts exemplary combinations of heavy and light chain variable regions of exemplary anti-Gal3 antibodies disclosed herein. In some embodiments, any of the compositions or methods provided herein can include one or more of the heavy and light chain variable region combinations provided herein.

[0047] FIG. 25 depicts exemplary heavy chain (HC) sequences and light chain (LC) sequences, and possible pairings for exemplary anti-Gal3 antibodies disclosed herein. In some embodiments, any of the compositions or methods provided herein can include one or more of the HC or LC, or pairs of HC and LC sequences provided herein.

[0048] FIG. 26 depicts peptides that were found to bind to exemplary anti-Gal3 antibodies disclosed herein (according to the peptide nomenclature depicted in FIG. 18 as discussed herein) and binning of these exemplary antibodies.

[0049] FIG. 27 depicts KD (M) values of Gal3 binding for exemplary anti-Gal3 antibodies disclosed herein.

[0050] FIG. 28 depicts antibody affinities (K_{D}) of anti-Gal3 humanized antibodies IMT001 and IMT006a for human, cynomolgus, and mouse Gal3.

[0051] FIG. 29 depicts antibody names used throughout the present disclosure refer to the same antibody (with exemplary peptide and nucleic acid sequences provided elsewhere in the disclosure and appropriately attributed to at least one of the depicted names) and may be used interchangeably. The names shown in a column correspond to the same antibody.

[0052] FIG. 30 depicts a graphical representation of relative GLUT4 translocation determined as a fold change between insulin-stimulated and insulin-unstimulated (basal) cells±Gal3 when contacted with various exemplary anti-Gal3 antibodies (or no antibody control), as measured by immunocytochemistry based assay. Antibody 2D10 here refers to 2D10-VH0-VL0.

[0053] FIG. 31A-B depict graphical representations of relative GLUT4 translocation determined as a fold change between insulin-stimulated and insulin-unstimulated (basal) cells±Gal3 when contacted with variants of 20H5 (FIG. 31A) or 2D10-VH0-VL0 (2D10) (FIG. 31B) (or no antibody control) as measured by immunocytochemistry based assay.

[0054] FIG. 32 depicts an alignment of hinge and constant heavy chain domain 2 (CH2) domain amino acid sequences of wild-type human immunoglobulin G1 (IgG1), IgG2 and IgG4 as well as their sigma variants. The alignment above uses EU numbering. Residues identical to wild-type IgG1 are indicated as dots; gaps are indicated with hyphens. Sequence is given explicitly if it differs from wild-type IgG1 or from the parental subtype for a variants. Open boxes beneath the alignment correspond to International Immunogenetics Information System (IMGT) strand definitions. Boxes beneath the alignment correspond to the strand and helix secondary structure assignment for wild-type IgG1. Residues 267-273 form the BC loop and 322-332 form the FG loop. Also provided are exemplary constant regions for human IgG4 heavy (S228P mutant) and light (kappa) chains (SEQ ID NOs: 945-946), murine IgG2A (LALAPG and LALA mutants) (SEQ ID NOs: 947-948), and human IgG1 (KEM, REM, and LALAPGv2 mutants) (SEQ ID NOs: 1615-1617). In some embodiments, any one or more of the VH/VL and/or CDRs provided in the other figures or otherwise disclosed herein can be paired with any one or more of the exemplary constant regions provided herein.

[0055] FIG. 33 depicts nucleic acid sequences that encode for exemplary heavy chain variable regions of anti-Gal3 antibodies disclosed herein. In some embodiments, any of the compositions or methods provided herein can include one or more of the heavy chain variable regions encoded by the nucleic acids provided herein.

[0056] FIG. 34 depicts nucleic acid sequences that encode for exemplary light chain variable regions of anti-Gal3 antibodies disclosed herein. In some embodiments, any of the compositions or methods provided herein can include one or more of the light chain variable regions encoded by the nucleic acids provided herein.

[0057] FIG. 35 depicts nucleic acid sequences that encode for exemplary heavy chains of anti-Gal3 antibodies disclosed herein. In some embodiments, any of the compositions or methods provided herein can include one or more of the heavy chains encoded by the nucleic acids provided herein.

[0058] FIG. 36 depicts nucleic acid sequences that encode for exemplary light chains of anti-Gal3 antibodies disclosed herein. In some embodiments, any of the compositions or methods provided herein can include one or more of the light chains encoded by the nucleic acids provided herein.

[0059] FIG. 37A-B depicts an exemplary alignment for the heavy chain CDRs (FIG. 37A) and light chain CDRs (FIG. 37B) for the exemplary anti-Gal3 antibodies disclosed herein.

[0060] FIG. 38A-D each depict a table with a subset of anti-Gal3 antibodies disclosed herein. In some embodiments, sequences, including heavy chain variable region CDRs, light chain variable region CDRs, heavy chain variable regions, light chain variable regions, heavy chains, and light chains, or combinations thereof, can be selected from any one or more of the anti-Gal3 antibodies provided as subsets in each table.

[0061] FIG. 39A-E each depict a table with a subset of anti-Gal3 antibodies disclosed herein. In some embodiments, sequences, including heavy chain variable region CDRs, light chain variable region CDRs, heavy chain variable regions, light chain variable regions, heavy chains, and light chains, or combinations thereof, can be selected from any one or more of the anti-Gal3 antibodies provided as subsets in each table.

[0062] FIG. 40A-C depict the quantification of affinity (KD) of TB006 (FIG. 40A), TB006 (FIG. 40B), and a control antibody Synagis (FIG. 40C) to human Gal3.

[0063] FIG. 41A-C depict the quantification of affinity (KD) of TB006 (FIG. 41A), TB006 (FIG. 41B), and a control antibody Synagis (FIG. 41C) to mouse Gal3.

[0064] FIG. 42A-B depict the quantification of affinity (KD) of TB006 (FIG. 42A, left panel), TB001 (FIG. 42B, right panel), and a control antibody Synagis (FIG. 42B) to cynomolgus Gal3.

[0065] FIG. 43A-C depict the quantification of affinity (KD) of TB006 (FIG. 43A), TB001 (FIG. 43B), and a control antibody Synagis (FIG. 43C) to rat Gal3.

[0066] FIG. 44A-E depict the quantification of insulin-independent GLUT4 translocation mediated by Gal3 complexed with exemplary anti-Gal3 antibodies TB006 (FIG. 44A), 2D10 variants (FIG. 44B), 20H5 variants (FIG. 44C), 21H6 variants (FIG. 44D), and other exemplary anti-Gal3 antibodies disclosed herein (FIG. 44E).

[0067] FIG. 45 depicts the quantification of insulin-independent GLUT4 translocated mediated by different mutants of Gal3 complexed with exemplary anti-Gal3 antibody TB006.

[0068] FIG. 46A-D depict the quantification of Gal3 binding to GLUT1 or GLUT4 by ELISA (FIG. 46A), and the ability of exemplary anti-Gal3 antibodies TB006 and 2D10-VH0-VL0 to disrupt the binding of Gal3 to GLUT1 (FIG. 46B) or GLUT4 (FIG. 46C). FIG. 46D depicts the IC50 of antibody-mediated disruption of the Gal3 binding to GLUT1 or GLUT4 as measured in FIG. 46B-C.

[0069] FIG. 47 depicts a hydrogen-deuterium mass spectrometric heat map of hGal3 complexed with GLUT4, showing the putative regions of Gal3 responsible for binding to GLUT4. On the heat map, darker regions have less deuterium uptake after binding.

[0070] FIG. 48 depicts fluorescent microscopy images of L6 myoblasts treated with exemplary anti-Gal3 antibodies TB006 or 2D10 with or without Gal3, indicating that the anti-Gal3 antibodies are internalized into the myoblasts only in the presence of Gal3.

[0071] FIG. 49A-B depict quantification of inhibition of Gal3-mediated glucose tolerance by co-treatment with anti-Gal3 antibodies in vivo. FIG. 49A shows an exemplary schematic of the study. FIG. 49B shows glucose levels in a time series of blood samples taken after administration of Gal3 with or without the exemplary anti-Gal3 antibody TB001 and subsequent administration of glucose. Mice injected with Gal3 only exhibited increased blood glucose levels, while mice injected with a mixture of Gal3 and anti-Gal3 antibody exhibited blood glucose levels similar to PBS injected control mice.

### DETAILED DESCRIPTION OF THE DISCLOSURE

[0072] Diabetes mellitus is a group of metabolic diseases characterized by a high blood sugar level over a prolonged period of time. There are three main types of diabetes mellitus: Type I diabetes, Type II diabetes, and gestational diabetes. Type I diabetes is caused by the failure of the pancreas to produce enough insulin due to the loss of insulin-producing beta cells. Type II diabetes is characterized by insulin resistance and may be due to a variety of lifestyle, dietary, and genetic factors, including obesity, poor diet, and stress. Gestational diabetes occurs when a pregnant woman without a prior history of diabetes develops high blood sugar levels.

[0073] In addition to diabetes, insulin resistance is associated with other diseases. Insulin resistance arises when cells of a subject become less sensitive to insulin, resulting in additional secretion of insulin by the pancreas. If the pancreas is unable to keep up with the necessary production of insulin to keep blood sugar levels at a safe level, the subject may progress into prediabetes and diabetes. Hyperinsulinemia (abnormally high levels of insulin in the blood) may also arise. Insulin resistance has also been attributed to other diseases including dysmetabolic syndrome, type A insulin resistance syndrome, type B insulin resistance syndrome, acanthosis nigricans, polycystic ovary syndrome (PCOS). Obesity and cardiovascular disease is also linked to insulin resistance and prediabetes/diabetes.

[0074] Galectin-3 (Gal3, GAL3) is known to play an important role in cell proliferation, adhesion, differentiation, angiogenesis, and apoptosis. This activity is, at least in part, due to immunomodulatory properties and binding affinity towards other immune regulatory proteins, signaling proteins, and other cell surface markers. Gal3 functions by distinct N-terminal and C-terminal domains. The N-terminal domain (isoform 1: amino acids 1-111, isoform 3: amino acids 1-125) comprise a tandem repeat domain (TRD, isoform 1: amino acids 36-109, isoform 3: amino acids 50-123) and is largely responsible for oligomerization of Gal3. The C-terminal domain (isoform 1: amino acids 112-250, isoform 3: amino acids 126-264) comprise a carbohydrate-recognition-binding domain (CRD), which binds to β-galactosides. An exemplary sequence for isoform 1 of human Gal3 (NCBI Reference No. NP_002297.2) is shown in SEQ ID NO: 1. An exemplary sequence for isoform 3 of human Gal3 (NCBI Reference No. NP_001344607.1) is shown in SEQ ID NO: 2.

[0075] Further, Gal3 has been shown to be elevated in obese humans and is believed to cause insulin resistance and glucose intolerance in these subjects. Gal3 has been shown to bind directly to insulin receptor and to inhibit downstream signaling. Thus, Gal3 may contribute to obesity-induced insulin resistance and chronic tissue inflammation.

[0076] In some embodiments, anti-Gal3 antibodies or binding fragments thereof or compositions comprising anti-Gal3 antibodies or binding fragments thereof are provided. In some embodiments, the anti-Gal3 antibodies or binding fragments thereof bind to the N-terminal domain, the N-terminus and/or the TRD of Gal3. In some embodiments, the anti-Gal3 antibodies or binding fragments thereof bind to the C-terminal domain, the C-terminus and/or the CRD of Gal3. In some embodiments, the anti-Gal3 antibodies or binding fragments thereof do not bind to the N-terminal domain, the N-terminus and/or the TRD of Gal3. In some embodiments, the anti-Gal3 antibodies or binding fragments thereof do not bind to the C-terminal domain, the C-terminus and/or the CRD of Gal3.

[0077] In some embodiments provided herein, it is shown that Gal3 inhibits glucose transporter (GLUT) translocation in biological cells. In some embodiments, the glucose transporter is GLUT1 and/or GLUT4. This inhibition may lead to insulin resistance and diseases or disorders associated with insulin resistance.

[0078] Disclosed herein, in some embodiments, are methods of enhancing GLUT translocation in a cell by contacting the cell with an anti-Gal3 antibody or binding fragment thereof. In some embodiments, the anti-Gal3 antibody or binding fragment thereof blocks or disrupts an interaction between Gal3 and GLUT, or another protein associated with GLUT translocation. In some embodiments, the GLUT is GLUT1 and/or GLUT4. This contacting may be done in vitro or in vivo.

[0079] Also disclosed herein, in some embodiments, are methods of enhancing GLUT translocation in a cell by contacting the cell with a preincubated complex of Gal3 and an anti-Gal3 antibody or binding fragment thereof. In some embodiments, the GLUT is GLUT1 and/or GLUT4. This contacting may be done in vitro or in vivo.

[0080] Also disclosed herein, in some embodiments, are methods of improving insulin sensitivity in a subject in need thereof by administering an anti-Gal3 antibody or binding fragment thereof to the subject. In some embodiments, the anti-Gal3 antibody or binding fragment thereof blocks or disrupts an interaction between Gal3 and GLUT, or another protein associated with GLUT translocation, thereby improving insulin sensitivity in the subject. In some embodiments, the GLUT is GLUT1 and/or GLUT4.

[0081] Also disclosed herein, in some embodiments, are methods of improving insulin sensitivity in a subject in need thereof by administering a preincubated complex of Gal3 and an anti-Gal3 antibody or binding fragment thereof to the subject, thereby improving insulin sensitivity in the subject. In some embodiments, the GLUT is GLUT1 and/or GLUT4.

[0082] Also disclosed herein, in some embodiments, are methods of treating a disease associated with insulin resistance in a subject in need thereof by administering an anti-Gal3 antibody or binding fragment thereof to the subject, thereby treating the disease associated with insulin resistance in the subject. In some embodiments, the disease associated with insulin resistance comprises diabetes mellitus, chronic hyperinsulinemia, dysmetabolic syndrome, type A insulin resistance syndrome, type B insulin resistance syndrome, gestational diabetes, acanthosis nigricans, polycystic ovary syndrome (PCOS), obesity, muscle wasting, cardiovascular disease, cardiac hypertrophy, myocardial ischemia, hypertension, pancreatic cancer associated diabetes (PCDM) or cancer. In some embodiments, administration of the anti-Gal3 antibody or binding fragment thereof to the subject treats the disease, or insulin resistance associated with the disease. In some embodiments, the method involves administering any antibody or variant thereof as provided herein, in a therapeutically effective amount, sufficient to interfere with the interaction between GAL3 and GLUT (e.g. GLUT1 and/or GLUT4), so as to treat (either in response to a subject having and/or to reduce the risk of) one or more of: diabetes mellitus, insulin resistance, chronic hyperinsulinemia, dysmetabolic syndrome, type A insulin resistance syndrome, type B insulin resistance syndrome, gestational diabetes, acanthosis nigricans, polycystic ovary syndrome (PCOS), obesity, muscle wasting, cardiovascular diseases, cardiac hypertrophy, myocardial ischemia, hypertension, pancreatic cancer associated diabetes (PCDM), or cancers.

[0083] Also disclosed herein, in some embodiments, are methods of treating a disease associated with insulin resistance in a subject in need thereof by administering a preincubated complex of Gal3 and an anti-Gal3 antibody or binding fragment thereof to the subject, thereby treating the disease associated with insulin resistance in the subject. In some embodiments, the disease associated with insulin resistance comprises diabetes mellitus, chronic hyperinsulinemia, dysmetabolic syndrome, type A insulin resistance syndrome, type B insulin resistance syndrome, gestational diabetes, acanthosis nigricans, polycystic ovary syndrome (PCOS), obesity, muscle wasting, cardiovascular disease, cardiac hypertrophy, myocardial ischemia, hypertension, pancreatic cancer associated diabetes (PCDM) or cancer. In some embodiments, administration of the anti-Gal3 antibody or binding fragment thereof to the subject treats the disease, or insulin resistance associated with the disease. In some embodiments, the method involves administering any antibody or variant thereof as provided herein, in a therapeutically effective amount, sufficient to interfere with the interaction between GAL3 and GLUT (e.g. GLUT1 and/or GLUT4), so as to treat (either in response to a subject having and/or to reduce the risk of) one or more of: diabetes mellitus, insulin resistance, chronic hyperinsulinemia, dysmetabolic syndrome, type A insulin resistance syndrome, type B insulin resistance syndrome, gestational diabetes, acanthosis nigricans, polycystic ovary syndrome (PCOS), obesity, muscle wasting, cardiovascular diseases, cardiac hypertrophy, myocardial ischemia, hypertension, pancreatic cancer associated diabetes (PCDM), or cancers.

[0084] In some embodiments, administering any one of the anti-Gal3 antibodies or binding fragments thereof disclosed herein can reduce insulin resistance in a subject.

### Definitions

[0085] In the following detailed description, reference is made to the accompanying drawings, which form a part hereof. In the drawings, similar symbols typically identify similar components, unless context dictates otherwise. The illustrative embodiments described in the detailed description, drawings, and claims are not meant to be limiting. Other embodiments may be utilized, and other changes may be made, without departing from the spirit or scope of the subject matter presented herein. It will be readily understood that the aspects of the present disclosure, as generally described herein, and illustrated in the Figures, can be arranged, substituted, combined, separated, and designed in a wide variety of different configurations, all of which are explicitly contemplated herein.

[0086] Unless defined otherwise, all technical and scientific terms used herein have the same meaning as is commonly understood by one of skill in the art to which the claimed subject matter belongs. It is to be understood that the foregoing general description and the following detailed description are exemplary and explanatory only and are not restrictive of any subject matter claimed.

[0087] The section headings used herein are for organizational purposes only and are not to be construed as limiting the subject matter described.

[0088] In this application, the use of the singular includes the plural unless specifically stated otherwise. It must be noted that, as used in the specification and the appended claims, the singular forms “a,” “an” and “the” include plural referents unless the context clearly dictates otherwise. In this application, the use of “or” means “and/or” unless stated otherwise. Furthermore, use of the term “including” as well as other forms, such as “include”, “includes,” and “included,” is not limiting.

[0089] By “about” is meant a quantity, level, value, number, frequency, percentage, dimension, size, amount, weight or length that varies by as much as 30, 25, 20, 15, 10, 9, 8, 7, 6, 5, 4, 3, 2 or 1% to a reference quantity, level, value, number, frequency, percentage, dimension, size, amount, weight or length.

[0090] Throughout this specification, unless the context requires otherwise, the words “comprise,” “comprises,” and “comprising” will be understood to imply the inclusion of a stated step or element or group of steps or elements but not the exclusion of any other step or element or group of steps or elements. By “consisting of” is meant including, and limited to, whatever follows the phrase “consisting of.” Thus, the phrase “consisting of” indicates that the listed elements are required or mandatory, and that no other elements may be present. By “consisting essentially of” is meant including any elements listed after the phrase and limited to other elements that do not interfere with or contribute to the activity or action specified in the disclosure for the listed elements. Thus, the phrase “consisting essentially of” indicates that the listed elements are required or mandatory, but that other elements are optional and may or may not be present depending upon whether or not they materially affect the activity or action of the listed elements.

[0091] As used herein, the terms “individual(s)”, “subject(s)” and “patient(s)” mean any mammal. In some embodiments, the mammal is a human. In some embodiments, the mammal is a non-human. None of the terms require or are limited to situations characterized by the supervision (e.g. constant or intermittent) of a health care worker (e.g. a doctor, a registered nurse, a nurse practitioner, a physician's assistant, an orderly or a hospice worker).

[0092] The terms “polypeptide”, “peptide”, and “protein” are used interchangeably herein to refer to polymers of amino acids of any length. The polymer may be linear, cyclic, or branched, it may comprise modified amino acids, and it may be interrupted by non-amino acids. The terms also encompass amino acid polymers that have been modified, for example, via sulfation, glycosylation, lipidation, acetylation, phosphorylation, iodination, methylation, oxidation, proteolytic processing, phosphorylation, prenylation, racemization, selenoylation, transfer-RNA mediated addition of amino acids to proteins such as arginylation, ubiquitination, or any other manipulation, such as conjugation with a labeling component.

[0093] As used herein the term “amino acid” refers to either natural and/or unnatural or synthetic amino acids, including glycine and both the D or L optical isomers, and amino acid analogs and peptidomimetics.

[0094] A polypeptide or amino acid sequence “derived from” a designated protein refers to the origin of the polypeptide. Preferably, the polypeptide has an amino acid sequence that is essentially identical to that of a polypeptide encoded in the sequence, or a portion thereof wherein the portion consists of at least 10-20 amino acids, or at least 20-30 amino acids, or at least 30-50 amino acids, or which is immunologically identifiable with a polypeptide encoded in the sequence. This terminology also includes a polypeptide expressed from a designated nucleic acid sequence.

[0095] As used herein, the term “antibody” denotes the meaning ascribed to it by one of skill in the art, and further it is intended to include any polypeptide chain-containing molecular structure with a specific shape that fits to and recognizes an epitope, where one or more non-covalent binding interactions stabilize the complex between the molecular structure and the epitope. Antibodies may be polyclonal antibodies, although monoclonal antibodies may be preferred because they may be reproduced by cell culture or recombinantly and can be modified to reduce their antigenicity.

[0096] In addition to entire immunoglobulins (or their recombinant counterparts), immunoglobulin fragments or “binding fragments” comprising the epitope binding site (e.g., Fab′, F(ab′)2, single-chain variable fragment (scFv), diabody, minibody, nanobody, single-domain antibody (sdAb), or other fragments) are useful as antibody moieties in the present invention. Such antibody fragments may be generated from whole immunoglobulins by ricin, pepsin, papain, or other protease cleavage. Minimal immunoglobulins may be designed utilizing recombinant immunoglobulin techniques. For instance “Fv” immunoglobulins for use in the present invention may be produced by linking a variable light chain region to a variable heavy chain region via a peptide linker (e.g., poly-glycine or another sequence which does not form an alpha helix or beta sheet motif). Nanobodies or single-domain antibodies can also be derived from alternative organisms, such as dromedaries, camels, llamas, alpacas, or sharks. In some embodiments, antibodies can be conjugates, e.g. pegylated antibodies, drug, radioisotope, or toxin conjugates. Monoclonal antibodies directed against a specific epitope, or combination of epitopes, will allow for the targeting and/or depletion of cellular populations expressing the marker. Various techniques can be utilized using monoclonal antibodies to screen for cellular populations expressing the marker(s), and include magnetic separation using antibody-coated magnetic beads, “panning” with antibody attached to a solid matrix (i.e., plate), and flow cytometry (e.g. U.S. Pat. No. 5,985,660, hereby expressly incorporated by reference in its entirety).

[0097] As known in the art, the term “Fc region” is used to define a C-terminal region of an immunoglobulin heavy chain. The “Fc region” may be a native sequence Fc region or a variant Fc region. Although the boundaries of the Fc region of an immunoglobulin heavy chain might vary, the human IgG heavy chain Fc region is usually defined to stretch from an amino acid residue at position Cys226, or from Pro230, to the carboxyl-terminus thereof. The numbering of the residues in the Fc region is that of the EU index as in Kabat. Kabat et al., Sequences of Proteins of Immunological Interest, 5th Ed. Public Health Service, National Institutes of Health, Bethesda, Md., 1991. The Fc region of an immunoglobulin generally comprises two constant domains, CH2 and CH3. As is known in the art, an Fc region can be present in dimer or monomeric form.

[0098] As known in the art, a “constant region” of an antibody refers to the constant region of the antibody light chain or the constant region of the antibody heavy chain, either alone or in combination.

[0099] A “variable region” of an antibody refers to the variable region of the antibody light chain or the variable region of the antibody heavy chain, either alone or in combination. As known in the art, the variable regions of the heavy and light chains each consist of four framework regions (FRs) connected by three complementarity determining regions (CDRs) also known as hypervariable regions, and contribute to the formation of the antigen binding site of antibodies. If variants of a subject variable region are desired, particularly with substitution in amino acid residues outside of a CDR region (i.e., in the framework region), appropriate amino acid substitution, preferably, conservative amino acid substitution, can be identified by comparing the subject variable region to the variable regions of other antibodies which contain CDR1 and CDR2 sequences in the same canonical class as the subject variable region (Chothia and Lesk, J Mol Biol 196(4): 901-917, 1987).

[0100] In certain embodiments, definitive delineation of a CDR and identification of residues comprising the binding site of an antibody is accomplished by solving the structure of the antibody and/or solving the structure of the antibody-ligand complex. In certain embodiments, that can be accomplished by any of a variety of techniques known to those skilled in the art, such as X-ray crystallography. In certain embodiments, various methods of analysis can be employed to identify or approximate the CDR regions. In certain embodiments, various methods of analysis can be employed to identify or approximate the CDR regions. Examples of such methods include, but are not limited to, the Kabat definition, the Chothia definition, the IMGT approach (Lefranc et al., 2003) Dev Comp Immunol. 27:55-77), computational programs such as Paratome (Kunik et al., 2012, Nucl Acids Res. W521-4), the AbM definition, and the conformational definition.

[0101] The Kabat definition is a standard for numbering the residues in an antibody and is typically used to identify CDR regions. See, e.g., Johnson & Wu, 2000, Nucleic Acids Res., 28: 214-8. The Chothia definition is similar to the Kabat definition, but the Chothia definition takes into account positions of certain structural loop regions. See, e.g., Chothia et al., 1986, J. Mol. Biol., 196: 901-17; Chothia et al., 1989, Nature, 342: 877-83. The AbM definition uses an integrated suite of computer programs produced by Oxford Molecular Group that model antibody structure. See, e.g., Martin et al., 1989, Proc Natl Acad Sci (USA), 86:9268-9272; “AbM™, A Computer Program for Modeling Variable Regions of Antibodies,” Oxford, UK; Oxford Molecular, Ltd. The AbM definition models the tertiary structure of an antibody from primary sequence using a combination of knowledge databases and ab initio methods, such as those described by Samudrala et al., 1999, “Ab Initio Protein Structure Prediction Using a Combined Hierarchical Approach,” in PROTEINS, Structure, Function and Genetics Suppl., 3:194-198. The contact definition is based on an analysis of the available complex crystal structures. See, e.g., MacCallum et al., 1996, J. Mol. Biol., 5:732-45. In another approach, referred to herein as the “conformational definition” of CDRs, the positions of the CDRs may be identified as the residues that make enthalpic contributions to antigen binding. See, e.g., Makabe et al., 2008, Journal of Biological Chemistry, 283:1156-1166. Still other CDR boundary definitions may not strictly follow one of the above approaches, but will nonetheless overlap with at least a portion of the Kabat CDRs, although they may be shortened or lengthened in light of prediction or experimental findings that particular residues or groups of residues do not significantly impact antigen binding. As used herein, a CDR may refer to CDRs defined by any approach known in the art, including combinations of approaches. The methods used herein may utilize CDRs defined according to any of these approaches. For any given embodiment containing more than one CDR, the CDRs may be defined in accordance with any of Kabat, Chothia, extended, IMGT, Paratome, AbM, and/or conformational definitions, or a combination of any of the foregoing.

[0102] As disclosed herein, sequences having a % identity to any of the sequences disclosed herein are envisioned and may be used. The terms “% identity” refer to the percentage of units (i.e. amino acids or nucleotides) that are the same between two or more sequences relative to the length of the sequence. When the two or more sequences being compared are the same length, the % identity will be respective that length. When two or more sequences being compared are different lengths, deletions and/or insertions may be introduced to obtain the best alignment. In some embodiments, these sequences may include peptide sequences, nucleic acid sequences, CDR sequences, variable region sequences, or heavy or light chain sequences. In some embodiments, any sequence having at least 80%, 81%, 82%, 83%, 84%, 85%, 86%, 87%, 88%, 89%, 90%, 91%, 92%, 93%, 94%, 95%, 96%, 97%, 98%, 99%, or 100% sequence identity to any of the sequences disclosed herein may be used. In some embodiments, any sequence having at least 0, 1, 2, 3, 4, 5, 6, 7, 8, 9, 10, 11, 12, 13, 14, 15, 16, 17, 18, 19, 20, 21, 22, 23, 24, 25, 26, 27, 28, 29, 30, 31, 32, 33, 34, 35, 36, 37, 38, 39, 40, 41, 42, 43, 44, 45, 46, 47, 48, 49, or 50 substitutions, deletions, or additions relative to any of the sequences disclosed herein may be used. The changes in sequences may apply to, for example, single amino acids, single nucleic acid bases, or nucleic acid codons; however, differences in longer stretches of sequences are also envisioned. As applied to antibody sequences, these differences in sequences may apply to antigen-binding regions (e.g., CDRs) or regions that do not bind to antigens or are only secondary to antigen binding (e.g., framework regions).

[0103] As disclosed herein, sequences having a % homology to any of the sequences disclosed herein are envisioned and may be used. The term “% homology” refers to the degree of conservation between two sequences when considering their three-dimensional structure. For example, homology between two protein sequences may be dependent on structural motifs, such as beta strands, alpha helices, and other folds, as well as their distribution throughout the sequence. Homology may be determined through structural determination, either empirically or in silico. In some embodiments, any sequence having at least 80%, 81%, 82%, 83%, 84%, 85%, 86%, 87%, 88%, 89%, 90%, 91%, 92%, 93%, 94%, 95%, 96%, 97%, 98%, 99%, or 100% sequence homology to any of the sequences disclosed herein may be used. In some embodiments, any sequence having at least 0, 1, 2, 3, 4, 5, 6, 7, 8, 9, 10, 11, 12, 13, 14, 15, 16, 17, 18, 19, 20, 21, 22, 23, 24, 25, 26, 27, 28, 29, 30, 31, 32, 33, 34, 35, 36, 37, 38, 39, 40, 41, 42, 43, 44, 45, 46, 47, 48, 49, or 50 substitutions, deletions, or additions relative to any of the sequences disclosed herein, which may or may not affect the overall % homology, may be used.

[0104] As applied herein, sequences having a certain % similarity to any of the sequence disclosed herein are envisioned and may be used. In some embodiments, these sequences may include peptide sequences, nucleic acid sequences, CDR sequences, variable region sequences, or heavy or light chain sequences. As understood in the art with respect to peptide sequences, “similarity” refers to the comparison of amino acids based on their properties, including but not limited to size, polarity, charge, pK, aromaticity, hydrogen bonding properties, or presence of functional groups (e.g. hydroxyl, thiol, amine, carboxyl, and the like). The term “% similarity” refers to the percentage of units (i.e. amino acids) that are the same between two or more sequences relative to the length of the sequence. When the two or more sequences being compared are the same length, the % similarity will be respective that length. When two or more sequences being compared are different lengths, deletions and/or insertions may be introduced to obtain the best alignment. The similarity of two amino acids may dictate whether a certain substitution is conservative or non-conservative. Methods of determining the conservativeness of an amino acid substitution are generally known in the art and may involve substitution matrices. Commonly used substitution matrices include BLOSUM45, BLOSUM62, BLOSUM80, PAM100, PAM120, PAM160, PAM200, PAM250, but other substitution matrices or approaches may be used as considered appropriate by the skilled person. A certain substitution matrix may be preferential over the others when considering aspects such as stringency, conservation and/or divergence of related sequences (e.g. within the same species or broader), and length of the sequences in question. As used herein, a peptide sequence having a certain % similarity to another sequence will have up to that % of amino acids that are either identical or an acceptable substitution as governed by the method of similarity determination used. In some embodiments, a sequence having at least 80%, 81%, 82%, 83%, 84%, 85%, 86%, 87%, 88%, 89%, 90%, 91%, 92%, 93%, 94%, 95%, 96%, 97%, 98%, 99%, or 100% sequence similarity to any of the sequences disclosed herein may be used. In some embodiments, any sequence having at least 0, 1, 2, 3, 4, 5, 6, 7, 8, 9, 10, 11, 12, 13, 14, 15, 16, 17, 18, 19, 20, 21, 22, 23, 24, 25, 26, 27, 28, 29, 30, 31, 32, 33, 34, 35, 36, 37, 38, 39, 40, 41, 42, 43, 44, 45, 46, 47, 48, 49, or 50 similar substitutions relative to any of the sequences disclosed herein may be used. As applied to antibody sequences, these similar substitutions may apply to antigen-binding regions (i.e. CDRs) or regions that do not bind to antigens or are only secondary to antigen binding (i.e. framework regions).

[0105] The term “consensus sequence” as used herein with regard to sequences refers to the generalized sequence representing all of the different combinations of permissible amino acids at each location of a group of sequences. A consensus sequence may provide insight into the conserved regions of related sequences where the unit (e.g. amino acid or nucleotide) is the same in most or all of the sequences, and regions that exhibit divergence between sequences. In the case of antibodies, the consensus sequence of a CDR may indicate amino acids that are important or dispensable for antigen binding. It is envisioned that consensus sequences may be prepared with any of the sequences provided herein, and the resultant various sequences derived from the consensus sequence can be validated to have similar effects as the template sequences.

[0106] The term “compete,” as used herein with regard to an antibody, means that a first antibody, or an antigen-binding portion thereof, binds to an epitope in a manner sufficiently similar to the binding of a second antibody, or an antigen-binding portion thereof, such that the result of binding of the first antibody with its cognate epitope is detectably decreased in the presence of the second antibody compared to the binding of the first antibody in the absence of the second antibody. The alternative, where the binding of the second antibody to its epitope is also detectably decreased in the presence of the first antibody, can, but need not be the case. That is, a first antibody can inhibit the binding of a second antibody to its epitope without that second antibody inhibiting the binding of the first antibody to its respective epitope. However, where each antibody detectably inhibits the binding of the other antibody with its cognate epitope or ligand, whether to the same, greater, or lesser extent, the antibodies are said to “cross-compete” with each other for binding of their respective epitope(s). Both competing and cross-competing antibodies are encompassed by the present invention. Regardless of the mechanism by which such competition or cross-competition occurs (e.g., steric hindrance, conformational change, or binding to a common epitope, or portion thereof), the skilled artisan would appreciate, based upon the teachings provided herein, that such competing and/or cross-competing antibodies are encompassed and can be useful for the methods disclosed herein.

[0107] An antibody that “preferentially binds” or “specifically binds” (used interchangeably herein) to an epitope is a term well understood in the art, and methods to determine such specific or preferential binding are also well known in the art. A molecule is said to exhibit “specific binding” or “preferential binding” if it reacts or associates more frequently, and/or more rapidly, and/or with greater duration and/or with greater affinity with a particular cell or substance than it does with alternative cells or substances. An antibody “specifically binds” or “preferentially binds” to a target if it binds with greater affinity, and/or avidity, and/or more readily, and/or with greater duration than it binds to other substances. For example, an antibody that specifically or preferentially binds to a target epitope is an antibody that binds this epitope with greater affinity, and/or avidity, and/or more readily, and/or with greater duration than it binds to other target epitopes or non-target epitopes. It is also understood by reading this definition that, for example, an antibody (or moiety or epitope) that specifically or preferentially binds to a first target may or may not specifically or preferentially bind to a second target. As such, “specific binding” or “preferential binding” does not necessarily require (although it can include) exclusive binding. Generally, but not necessarily, reference to binding means preferential binding.

[0108] The term “block” or “disrupt” as used herein with regard to an antibody refers to the ability of an antibody to interfere with a biological process, including but not limited to activity of an enzyme, binding of two or more biological molecules (e.g. two or more proteins, peptides, nucleic acids, lipids, and the like), or advancement of a signaling cascade. Generally, interference with a biological process will involve the antibody binding to its target or an epitope thereof, thereby interfering with the normal function of said target, such as occluding an active site of the target, occluding another region of the target important for its function, or altering the localization and/or transport of the target. The blocking or disruption activity of an antibody may be quantified in terms of the reduction of the biological process in question relative to a control condition where the biological process is not disrupted. In other cases, the blocking or disruption activity of an antibody may be quantified in terms of a modulation in another biological process known to be associated with the target biological process, whether it be directly related or inversely related. In some embodiments, the blocking or disruption activity may cause a change of at least 5%, 10%, 20%, 30%, 40%, 50%, 60%, 70%, 80%, 90%, or 100%, or any percentage within a range defined by any two of the aforementioned values, relative to a control condition. In some embodiments provided herein, an interaction between Gal3 and GLUT (e.g., GLUT1 and/or GLUT4) is a biological process that can be disrupted by an anti-Gal3 antibody. It is envisioned that the interaction between Gal3 and GLUT may or may not be a direct interaction between Gal3 and GLUT, and the anti-Gal3 antibody may interfere with some other aspect of the activity of Gal3 and/or GLUT.

[0109] As used herein, the term “antigen binding molecule” refers to a molecule that comprises an antigen binding portion that binds to an antigen and, optionally, a scaffold or framework portion that allows the antigen binding portion to adopt a conformation that promotes binding of the antigen binding portion or provides some additional properties to the antigen binding molecule. In some embodiments, the antigen is Gal3. In some embodiments, the antigen binding portion comprises at least one CDR from an antibody that binds to the antigen. In some embodiments, the antigen binding portion comprises all three CDRs from a heavy chain of an antibody that binds to the antigen or from a light chain of an antibody that binds to the antigen. In some embodiments, the antigen binding portion comprises all six CDRs from an antibody that binds to the antigen (three from the heavy chain and three from the light chain). In some embodiments, the antigen binding portion is an antibody fragment.

[0110] Nonlimiting examples of antigen binding molecules include antibodies, antibody fragments (e.g., an antigen binding fragment of an antibody), antibody derivatives, and antibody analogs. Further specific examples include, but are not limited to, a single-chain variable fragment (scFv), a nanobody (e.g. VH domain of camelid heavy chain antibodies; VHH fragment, see Cortez-Retamozo et al., Cancer Research, Vol. 64:2853-57, 2004), a Fab fragment, a Fab′ fragment, a F(ab′)2 fragment, a Fv fragment, a Fd fragment, and a complementarity determining region (CDR) fragment. These molecules can be derived from any mammalian source, such as human, mouse, rat, rabbit, pig, dog, cat, horse, donkey, guinea pig, goat, or camelid. Antibody fragments may compete for binding of a target antigen with an intact antibody and the fragments may be produced by the modification of intact antibodies (e.g. enzymatic or chemical cleavage) or synthesized de novo using recombinant DNA technologies or peptide synthesis. The antigen binding molecule can comprise, for example, an alternative protein scaffold or artificial scaffold with grafted CDRs or CDR derivatives. Such scaffolds include, but are not limited to, antibody-derived scaffolds comprising mutations introduced to, for example, stabilize the three-dimensional structure of the antigen binding molecule as well as wholly synthetic scaffolds comprising, for example, a biocompatible polymer. See, for example, Korndorfer et al., 2003, Proteins: Structure, Function, and Bioinformatics, Volume 53, Issue 1:121-129 (2003); Roque et al., Biotechnol. Prog. 20:639-654 (2004). In addition, peptide antibody mimetics (“PAMs”) can be used, as well as scaffolds based on antibody mimetics utilizing fibronectin components as a scaffold.

[0111] An antigen binding molecule can also include a protein comprising one or more antibody fragments incorporated into a single polypeptide chain or into multiple polypeptide chains. For instance, antigen binding molecule can include, but are not limited to, a diabody (see, e.g., EP 404,097; WO 93/11161; and Hollinger et al., Proc. Natl. Acad. Sci. USA, Vol. 90:6444-6448, 1993); an intrabody; a domain antibody (single VL or VH domain or two or more VH domains joined by a peptide linker; see Ward et al., Nature, Vol. 341:544-546, 1989); a maxibody (2 scFvs fused to Fc region, see Fredericks et al., Protein Engineering, Design & Selection, Vol. 17:95-106, 2004 and Powers et al., Journal of Immunological Methods, Vol. 251:123-135, 2001); a triabody; a tetrabody; a minibody (scFv fused to CH3 domain; see Olafsen et al., Protein Eng Des Sel., Vol. 17:315-23, 2004); a peptibody (one or more peptides attached to an Fc region, see WO 00/24782); a linear antibody (a pair of tandem Fd segments (VH-CH1-VH-CH1) which, together with complementary light chain polypeptides, form a pair of antigen binding regions, see Zapata et al., Protein Eng., Vol. 8:1057-1062, 1995); a small modular immunopharmaceutical (see U.S. Patent Publication No. 20030133939); and immunoglobulin fusion proteins (e.g. IgG-scFv, IgG-Fab, 2scFv-IgG, 4scFv-IgG, VH-IgG, IgG-VH, and Fab-scFv-Fc).

[0112] In certain embodiments, an antigen binding molecule can have, for example, the structure of an immunoglobulin. An “immunoglobulin” is a tetrameric molecule, with each tetramer comprising two identical pairs of polypeptide chains, each pair having one “light” (about 25 kDa) and one “heavy” chain (about 50-70 kDa). The amino-terminal portion of each chain includes a variable region of about 100 to 110 or more amino acids primarily responsible for antigen recognition. The carboxy-terminal portion of each chain defines a constant region primarily responsible for effector function.

[0113] Unless otherwise specified, the complementarity defining regions disclosed herein follow the IMGT definition. In some embodiments, any of the CDRs disclosed herein can instead be interpreted by Kabat, Chothia, or other definitions accepted by those of skill in the art.

[0114] The term “humanized” as applies to a non-human (e.g. rodent or primate) antibodies are hybrid immunoglobulins, immunoglobulin chains or fragments thereof which contain minimal sequence derived from non-human immunoglobulin.

[0115] As used herein, the term “cytokine” refers to small proteins, polypeptides, or peptides that are involved in inflammatory signaling or proteins released by one cell population that act on another cell as intercellular mediators or have an autocrine effect on the cells producing the proteins. Cytokines include but are not limited to chemokines, interferons, interleukins, lymphokines, monokines, tumor necrosis factors, CCL1, CCl2, CCL3, CCL4, CCL5, CCL6, CCL7, CCL8, CCL9, CCL11, CCL12, CCL13, CCL14, CCL15, CCL16, CCL17, CCL18, CCL19, CCL20, CCL21, CCL22, CCL23, CCL24, CCL25, CCL26, CCL27, CCL28, CXCL1, CXCL2, CXCL3, CXCL4, CXCL5, CXCL6, CXCL7, CXCL8, CXCL9, CXCL10, CXCL11, CXCL12, CXCL13, CXCL14, CXCL15, CXCL16, CXCL17, CX3CL1, XCL1, XCL2, INFα, INFβ, INFγ, IL-1, IL-1a, IL-2, IL-3, IL-4, IL-5, IL-6, IL-7, IL-8, IL-9, IL-10, IL-11, IL-12, IL-13, IL-14, IL-15, IL-16, IL-17, IL-17A-F, IL-18, IL-19, IL-20, IL-21, IL-22, IL-23, IL-24, IL-25, IL-26, IL-27, IL-28, IL-29, IL-30, IL-31, IL-32, IL-33, IL-34, IL-35, IL-36, IL-37, IL-38, adesleukin, GM-CSF, TNFα, TNFβ, TNFγ, TGF-I-3 TNFSF4, TNFSF5, TNFSF6, TNFSF7, TNFSF8, TNFSF9, TNFSF10, TNFSF11, TNFSF12, TNFSF13, TNFSF13B, TNFSF14, TNFSF15, TNFSF18, or TNFSF19, leukemia inhibitor factor (LIF), ciliary neurotrophic factor (CNTF), CNTF-like cytokine (CLC), cardiotrophin (CT), Kit ligand (KL), or any combination thereof.

[0116] As used herein, the terms “treating” or “treatment” (and as well understood in the art) means an approach for obtaining beneficial or desired results in a subject's condition, including clinical results. Beneficial or desired clinical results can include, but are not limited to, alleviation or amelioration of one or more symptoms or conditions, diminishment of the extent of a disease, stabilizing (i.e., not worsening) the state of disease, prevention of a disease's transmission or spread, delaying or slowing of disease progression, amelioration or palliation of the disease state, diminishment of the reoccurrence of disease, and remission, whether partial or total and whether detectable or undetectable. “Treating” and “treatment” as used herein also include prophylactic treatment. Treatment methods comprise administering to a subject a therapeutically effective amount of an active agent. The administering step may consist of a single administration or may comprise a series of administrations. The compositions are administered to the subject in an amount and for a duration sufficient to treat the subject. The length of the treatment period depends on a variety of factors, such as the severity of the condition, the age and genetic profile of the subject, the concentration of active agent, the activity of the compositions used in the treatment, or a combination thereof. It will also be appreciated that the effective dosage of an agent used for the treatment or prophylaxis may increase or decrease over the course of a particular treatment or prophylaxis regime. Changes in dosage may result and become apparent by standard diagnostic assays known in the art. In some instances, chronic administration may be required.

[0117] The terms “effective amount” or “effective dose” as used herein have their plain and ordinary meaning as understood in light of the specification, and refer to that amount of a recited composition or compound that results in an observable designated effect. Actual dosage levels of active ingredients in an active composition of the presently disclosed subject matter can be varied so as to administer an amount of the active composition or compound that is effective to achieve the designated response for a particular subject and/or application. The selected dosage level can vary based upon a variety of factors including, but not limited to, the activity of the composition, formulation, route of administration, combination with other drugs or treatments, severity of the condition being treated, and the physical condition and prior medical history of the subject being treated. In some embodiments, a minimal dose is administered, and dose is escalated in the absence of dose-limiting toxicity to a minimally effective amount. Determination and adjustment of an effective dose, as well as evaluation of when and how to make such adjustments, are contemplated herein.

[0118] In some non-limiting embodiments, an effective amount or effective dose of a composition or compound may relate to the amount or dose that provides a significant, measurable, or sufficient therapeutic effect towards the treatment of any one or more of the diseases provided herein, such as insulin resistance, diabetes mellitus, chronic hyperinsulinemia, dysmetabolic syndrome, type A insulin resistance syndrome, type B insulin resistance syndrome, gestational diabetes, acanthosis nigricans, polycystic ovary syndrome (PCOS), obesity, muscle wasting, cardiovascular disease, cardiac hypertrophy, myocardial ischemia, hypertension, pancreatic cancer associated diabetes (PCDM) or cancers. In some embodiments, the effective amount or effective dose of a composition or compound may treat, ameliorate, or prevent the progression of symptoms of any one or more of the diseases provided herein.

[0119] The term “administering” includes oral administration, topical contact, administration as a suppository, intravenous, intraperitoneal, intramuscular, intralesional, intrathecal, intranasal, or subcutaneous administration, or the implantation of a slow-release device, e.g., a mini-osmotic pump, to a subject. Administration is by any route, including parenteral and transmucosal (e.g., buccal, sublingual, palatal, gingival, nasal, vaginal, rectal, or transdermal). Parenteral administration includes, e.g., intravenous, intramuscular, intra-arteriole, intradermal, subcutaneous, intraperitoneal, intraventricular, and intracranial. Other modes of delivery include, but are not limited to, the use of liposomal formulations, intravenous infusion, transdermal patches, etc. By “co-administer” it is meant that a first compound described herein is administered at the same time, just prior to, or just after the administration of a second compound described herein.

[0120] As used herein, the term “therapeutic target” refers to a gene or gene product that, upon modulation of its activity (e.g., by modulation of expression, biological activity, and the like), can provide for modulation of the disease phenotype. As used throughout, “modulation” is meant to refer to an increase or a decrease in the indicated phenomenon (e.g., modulation of a biological activity refers to an increase in a biological activity or a decrease in a biological activity).

[0121] As used herein, “pharmaceutically acceptable” has its plain and ordinary meaning as understood in light of the specification and refers to carriers, excipients, and/or stabilizers that are nontoxic to the cell or mammal being exposed thereto at the dosages and concentrations employed or that have an acceptable level of toxicity. A “pharmaceutically acceptable” “diluent,” “excipient,” and/or “carrier” as used herein have their plain and ordinary meaning as understood in light of the specification and are intended to include any and all solvents, dispersion media, coatings, antibacterial and antifungal agents, isotonic and absorption delaying agents, and the like, compatible with administration to humans, cats, dogs, or other vertebrate hosts. Typically, a pharmaceutically acceptable diluent, excipient, and/or carrier is a diluent, excipient, and/or carrier approved by a regulatory agency of a Federal, a state government, or other regulatory agency, or listed in the U.S. Pharmacopeia or other generally recognized pharmacopeia for use in animals, including humans as well as non-human mammals, such as cats and dogs. The term diluent, excipient, and/or carrier can refer to a diluent, adjuvant, excipient, or vehicle with which the pharmaceutical formulation is administered. Such pharmaceutical diluent, excipient, and/or carriers can be sterile liquids, such as water and oils, including those of petroleum, animal, vegetable or synthetic origin. Water, saline solutions and aqueous dextrose and glycerol solutions can be employed as liquid diluents, excipients, and/or carriers, particularly for injectable solutions. Suitable pharmaceutical diluents and/or excipients include sugars, starch, glucose, fructose, lactose, sucrose, maltose, gelatin, malt, rice, flour, chalk, silica gel, sodium stearate, glycerol monostearate, talc, salts, sodium chloride, dried skim milk, glycerol, propylene, glycol, water, ethanol and the like. A non-limiting example of a physiologically acceptable carrier is an aqueous pH buffered solution. The physiologically acceptable carrier may also comprise one or more of the following: antioxidants, such as ascorbic acid, low molecular weight (less than about 10 residues) polypeptides, proteins, such as serum albumin, gelatin, immunoglobulins, hydrophilic polymers such as polyvinylpyrrolidone, amino acids, carbohydrates such as glucose, mannose, or dextrins, chelating agents such as EDTA, sugar alcohols such as glycerol, erythritol, threitol, arabitol, xylitol, ribitol, mannitol, sorbitol, galactitol, fucitol, iditol, inositol, isomalt, maltitol, or lactitol, salt-forming counterions such as sodium, and nonionic surfactants such as TWEEN®, polyethylene glycol (PEG), and PLURONICS®. The formulation, if desired, can also contain minor amounts of wetting, bulking, emulsifying agents, or pH buffering agents. These formulations can take the form of solutions, suspensions, emulsion, sustained release formulations and the like. The formulation should suit the mode of administration.

[0122] The term “pharmaceutically acceptable salts” has its plain and ordinary meaning as understood in light of the specification and includes relatively non-toxic, inorganic and organic acid, or base addition salts of compositions or excipients, including without limitation, analgesic agents, therapeutic agents, other materials, and the like. Examples of pharmaceutically acceptable salts include those derived from mineral acids, such as hydrochloric acid and sulfuric acid, and those derived from organic acids, such as ethanesulfonic acid, benzenesulfonic acid, p-toluenesulfonic acid, and the like. Examples of suitable inorganic bases for the formation of salts include the hydroxides, carbonates, and bicarbonates of ammonia, sodium, lithium, potassium, calcium, magnesium, aluminum, zinc, and the like. Salts may also be formed with suitable organic bases, including those that are non-toxic and strong enough to form such salts. For example, the class of such organic bases may include but are not limited to mono-, di-, and trialkylamines, including methylamine, dimethylamine, and triethylamine; mono-, di-, or trihydroxyalkylamines including mono-, di-, and triethanolamine; amino acids, including glycine, arginine and lysine; guanidine; N-methylglucosamine; N-methylglucamine; L-glutamine; N-methylpiperazine; morpholine; ethylenediamine; N-benzylphenethylamine; trihydroxymethyl aminoethane.

[0123] As used herein, a “carrier” refers to a compound, particle, solid, semi-solid, liquid, or diluent that facilitates the passage, delivery and/or incorporation of a compound to cells, tissues and/or bodily organs. For example, without limitation, a lipid nanoparticle (LNP) is a type of carrier that can encapsulate an oligonucleotide to thereby protect the oligonucleotide from degradation during passage through the bloodstream and/or to facilitate delivery to a desired organ, such as to the lungs.

[0124] As used herein, a “diluent” refers to an ingredient in a pharmaceutical composition that lacks pharmacological activity but may be pharmaceutically necessary or desirable. For example, a diluent may be used to increase the bulk of a potent drug whose mass is too small for manufacture and/or administration. It may also be a liquid for the dissolution of a drug to be administered by injection, ingestion or inhalation. A common form of diluent in the art is a buffered aqueous solution such as, without limitation, phosphate buffered saline that mimics the composition of human blood.

[0125] The term “excipient” has its ordinary meaning as understood in light of the specification, and refers to inert substances, compounds, or materials added to a pharmaceutical composition to provide, without limitation, bulk, consistency, stability, binding ability, lubrication, disintegrating ability etc., to the composition. Excipients with desirable properties include but are not limited to preservatives, adjuvants, stabilizers, solvents, buffers, diluents, solubilizing agents, detergents, surfactants, chelating agents, antioxidants, alcohols, ketones, aldehydes, ethylenediaminetetraacetic acid (EDTA), citric acid, salts, sodium chloride, sodium bicarbonate, sodium phosphate, sodium borate, sodium citrate, potassium chloride, potassium phosphate, magnesium sulfate sugars, dextrose, dextran, fructose, mannose, lactose, galactose, sucrose, sorbitol, cellulose, methyl cellulose, hydroxypropyl methyl cellulose (hypromellose), glycerin, polyvinyl alcohol, povidone, propylene glycol, serum, amino acids, polyethylene glycol, polysorbate 20, polysorbate 80, sodium deoxycholate, sodium taurodeoxycholate, magnesium stearate, octylphenol ethoxylate, benzethonium chloride, thimerosal, gelatin, esters, ethers, 2-phenoxyethanol, urea, or vitamins, or any combination thereof. The amount of the excipient may be found in a pharmaceutical composition at a percentage of 0%, 0.1%, 0.2%, 0.3%, 0.4%, 0.5%, 0.6%, 0.7%, 0.8%, 0.9%, 1%, 2%, 3%, 4%, 5%, 6%, 7%, 8%, 9%, 10%, 20%, 30%, 40%, 50%, 60%, 70%, 80%, 90%, 95%, 100% w/w or any percentage by weight in a range defined by any two of the aforementioned numbers.

[0126] Additional excipients with desirable properties include but are not limited to preservatives, adjuvants, stabilizers, solvents, buffers, diluents, solubilizing agents, detergents, surfactants, chelating agents, antioxidants, alcohols, ketones, aldehydes, ethylenediaminetetraacetic acid (EDTA), tris(hydroxymethyl)aminomethane (Tris), citric acid, ascorbic acid, acetic acid, salts, phosphates, citrates, acetates, succinates, chlorides, bicarbonates, borates, sulfates, sodium chloride, sodium bicarbonate, sodium phosphate, sodium borate, sodium citrate, potassium chloride, potassium phosphate, magnesium sulfate sugars, dextrose, dextran 40, fructose, mannose, lactose, trehalose, galactose, sucrose, sorbitol, mannitol, cellulose, serum, amino acids, alanine, arginine, asparagine, aspartic acid, cysteine, glutamine, glutamic acid, glycine, histidine, isoleucine, leucine, lysine, methionine, phenylalanine, proline, serine, threonine, tryptophan, tyrosine, valine, polysorbate 20, polysorbate 40, polysorbate, 60, polysorbate 80, poloxamer, poloxamer 188, sodium deoxycholate, sodium taurodeoxycholate, magnesium stearate, octylphenol ethoxylate, benzethonium chloride, thimerosal, gelatin, esters, ethers, 2-phenoxyethanol, urea, or vitamins, or any combination thereof. Some excipients may be in residual amounts or contaminants from the process of manufacturing, including but not limited to serum, albumin, ovalbumin, antibiotics, inactivating agents, formaldehyde, glutaraldehyde, 0-propiolactone, gelatin, cell debris, nucleic acids, peptides, amino acids, or growth medium components or any combination thereof. The amount of the excipient may be found in the formulation at a percentage that is at least 0%, 0.1%, 0.2%, 0.3%, 0.4%, 0.5%, 0.6%, 0.7%, 0.8%, 0.9%, 1%, 2%, 3%, 4%, 5%, 6%, 7%, 8%, 9%, 10%, 20%, 30%, 40%, 50%, 60%, 70%, 80%, 90%, 95%, 100% w/w or any percentage by weight in a range defined by any two of the aforementioned numbers.

[0127] The term “purity” of any given substance, compound, or material as used herein refers to the actual abundance of the substance, compound, or material relative to the expected abundance. For example, the substance, compound, or material may be at least 80, 85, 90, 91, 92, 93, 94, 95, 96, 97, 98, 99, or 100% pure, including all decimals in between. Purity may be affected by unwanted impurities, including but not limited to side products, isomers, enantiomers, degradation products, solvent, carrier, vehicle, or contaminants, or any combination thereof. Purity can be measured technologies including but not limited to chromatography, liquid chromatography, gas chromatography, spectroscopy, UV-visible spectrometry, infrared spectrometry, mass spectrometry, nuclear magnetic resonance, gravimetry, or titration, or any combination thereof.

[0128] As used herein, the term “standard of care”, “best practice” and “standard therapy” refers to the treatment that is accepted by medical practitioners to be an appropriate, proper, effective, and/or widely used treatment for a certain disease. The standard of care of a certain disease depends on many different factors, including the biological effect of treatment, region or location within the body, patient status (e.g. age, weight, gender, hereditary risks, other disabilities, secondary conditions), toxicity, metabolism, bioaccumulation, therapeutic index, dosage, and other factors known in the art. Determining a standard of care for a disease is also dependent on establishing safety and efficacy in clinical trials as standardized by regulatory bodies such as the US Food and Drug Administration, International Council for Harmonisation, Health Canada, European Medicines Agency, Therapeutics Goods Administration, Central Drugs Standard Control Organization, National Medical Products Administration, Pharmaceuticals and Medical Devices Agency, Ministry of Food and Drug Safety, and the World Health Organization. The standard of care for a disease may include but is not limited to surgery, radiation, chemotherapy, targeted therapy, or immunotherapy.

[0129] As used herein, the term “insulin resistance” is understood in the art and refers to the phenomenon where the cells of a subject become less sensitive to insulin, whether it is insulin produced endogenously by the pancreas of the subject, or administered exogenously for treatments. Insulin is necessary to signal glucose uptake by cells to use as a source of energy. Excessive blood sugar levels and/or increased blood levels of insulin (which may also arise due to the pancreas responding to high blood sugar levels) may lead to cells becoming less responsive to normal levels of insulin release. This can notably lead to prediabetes and type 2 diabetes, but insulin resistance has been associated with other diseases and disorders, such as dysmetabolic syndrome, obesity, muscle wasting, hyperinsulinemia, cardiovascular disease, cardiac hypertrophy, myocardial ischemia, hypertension, type A insulin resistance syndrome, type B insulin resistance syndrome, gestational diabetes, acanthosis nigricans, polycystic ovary syndrome, pancreatic cancer associated diabetes (PCDM) and cancer. Furthermore, while insulin resistance is not generally the main cause of type 1 diabetes, type 1 diabetics can also develop insulin resistance.

[0130] Also provided herein are methods for “improving insulin sensitivity”, such as in a cell or a patient, which refers to the amelioration of insulin resistance and increasing the relative response of the cell or patient to normal insulin levels. Insulin sensitivity is the ability of insulin to clear excess glucose from the bloodstream by inducing the uptake of glucose by peripheral tissues such as skeletal muscle and adipose tissue. Diabetes is a metabolic disorder which occurs due to the defect in insulin secretion and insulin action (in other terms, insulin sensitivity in insulin responsive tissues which leads to glucose clearance). An improvement in insulin sensitivity may be measured through approaches generally known in the art, such as measuring blood sugar levels or blood insulin levels of a patient, glucose tolerance testing, or hyperinsulinemic euglycemic clamp. For in vitro studies, an improvement in insulin sensitivity can be indirectly measured according to a glucose transporter 1 (GLUT1) or glucose transporter 4 (GLUT4) translocation insulin stimulation index. Information regarding this measurement is known to one of skill in the art, as shown in, for example: Sun Y, Chiu T T, Foley K P, Bilan P J, Klip A. (2014) “Myosin Va mediates Rab8A-regulated GLUT4 vesicle exocytosis in insulin-stimulated muscle cells”. Mol Biol Cell. 25: 1159-70 and Tunduguru R, Zhang J, Aslamy A, Salunkhe V A, Brozinick J T, Elmendorf J S, Thurmond D C. “The actin-related p41ARC subunit contributes to p21-activated kinase-1 (PAK1)-mediated glucose uptake into skeletal muscle cells”. J Biol Chem. 2017 September 25. pii: jbc.M117.801340, each of which is hereby expressly incorporated by reference in its entirety. Improvement in insulin sensitivity, for example with an anti-Gal3 antibody or binding fragment thereof, can be compared to other treatment regimens, such as dietary changes, weight loss, exercise, metformin, and thiazolidinediones, indicated for insulin resistant patients.

[0131] As used herein, the term “glucose transporter 1 (GLUT1)” refers to a major insulin-independent glucose transporter that is highly conserved among mammals and is found prevalently in different tissues. Dysfunction in GLUT1 is associated with GLUT1 deficiency syndromes (De Vivo disease), idiopathic generalized epilepsy 12, dystonia 9, and stomatin-deficient cryohydrocytosis. An exemplary sequence for human GLUT1 is provided as SEQ ID NO: 1618. GLUT1 is also known as SLC2A1.

[0132] As used herein, the term “glucose transporter 4 (GLUT4)” refers to the insulin-responsive glucose transporter expressed by cells. An exemplary sequence for human GLUT4 is provided as SEQ ID NO: 950. GLUT4 is a transmembrane protein that facilitates exchange of glucose between cells and the blood stream. GLUT4 stored in intracellular vesicles are translocated to the plasma membrane following a signaling cascade induced by insulin. For insulin resistant cells, this translocation process is inhibited, resulting in less GLUT4 being transported to the plasma membrane and abnormal glucose intake. GLUT4 is also known as SLC2A4.

[0133] Also provided herein are methods directed to “enhancing GLUT translocation”. This term refers to the inducement of improved GLUT transport and activity within a cell, such as an insulin resistant cell, which may have originally exhibited reduced GLUT translocation compared to normal cells. In some embodiments, the GLUT is GLUT 1 and/or GLUT4. Enhancing GLUT translocation may also apply to the reversal of dysfunctional GLUT translocation caused by a deleterious cellular function. In some embodiments, as shown herein, GLUT translocation is inhibited by Gal3. Application of a Gal3 inhibitor, such as an anti-Gal3 antibody, may improve GLUT translocation, thereby reversing the activity of Gal3. In some embodiments, the enhancement may be by at least 5%, 10%, 20%, 30%, 40%, 50%, 60%, 70%, 80%, 90%, or 100%, or any percentage that is within a range defined by any two of the aforementioned values.

[0134] As used herein, the term “inhibit” refers to the reduction or decrease in an expected activity, such as a cellular activity. The reduction or decrease may be by at least 5%, 10%, 20%, 30%, 40%, 50%, 60%, 70%, 80%, 90%, or 100%, or any percentage that is within a range defined by any two of the aforementioned values, where a reduction or decrease of 100% indicates a complete inhibition and any lower percentage indicates a partial inhibition. The reduction or decrease of the expected activity may be observed in a direct or indirect way. For example, as disclosed herein, it is demonstrated that Gal3 inhibits GLUT (e.g., GLUT1 and/or GLUT4) translocation within the cell. This inhibition of GLUT translocation (as well as a potential reversal of said inhibition, e.g. with one or more of the proteins disclosed herein) can be observed through the direct observation of GLUT movement or abundance within the cell, or observing indirect properties such as glucose intake.

[0135] The term “half maximal inhibitory concentration” often abbreviated as “IC50” refers to the concentration of a substance (e.g., a compound or antibody) that results in 50% inhibition of a biological process, or a component of the process (e.g. protein binding).

[0136] The term “% w/w” or “% wt/wt” means a percentage expressed in terms of the weight of the ingredient or agent over the total weight of the composition multiplied by 100.

[0137] It is understood that an antibody with an antibody name described herein can be referred using a shortened version of the antibody name, as long as there are no conflicts with another antibody described herein. For example, F846C.1B2 can also be referred to as 846C.1B2, or 846.1B2. This can also refer to fragments of the antibody (e.g., with the same 1, 3, or 6 CDRs).

### Exemplary Anti-Gal3 Antibodies and Binding Fragments Thereof

[0138] Disclosed herein and as applicable to any of the methods or uses disclosed herein are anti-Gal3 antibodies or binding fragments thereof. In some embodiments, the anti-Gal3 antibody or binding fragment thereof binds to the N-terminal domain of Gal3, N-terminus of Gal3, or the tandem repeat domain (TRD) of Gal3. In some embodiments, the anti-Gal3 antibody or binding fragment thereof does not bind to the N-terminus of Gal3, the N-terminal domain of Gal3, or the TRD of Gal3. In some embodiments, the anti-Gal3 antibody or binding fragment thereof binds to the C-terminus of Gal3, the C-terminal domain of Gal3, or the CRD of Gal3. In some embodiments, the anti-Gal3 antibody or binding fragment thereof does not bind to the C-terminus of Gal3, the C-terminal domain of Gal3, or the CRD of Gal3. In some embodiments, any of the anti-Gal3 antibodies or binding fragments thereof or any arrangement of any of the anti-Gal3 antibodies or binding fragments provided herein may be substituted with an antigen binding molecule that binds to Gal3.

[0139] In some embodiments, the constructs provided herein are provided in a subcutaneous formulation or an intravenous formulation. In some embodiments, the constructs provided herein are provided in a subcutaneous formulation.

[0140] In some embodiments, antibodies or binding fragments thereof are provided. In some embodiments, the antibodies are anti-Gal3 antibodies or binding fragments thereof. In some embodiments, the anti-Gal3 antibodies or binding fragments thereof comprises a heavy chain variable region comprising a V_{H}-CDR1, a V_{H}-CDR2, and a V_{H}-CDR3. In some embodiments, the anti-Gal3 antibodies or binding fragments thereof comprise a light chain variable region comprising a V_{L}-CDR1, a V_{L}-CDR2, and a V_{L}-CDR3. In some embodiments, the V_{H}-CDR1 comprises an amino acid sequence having at least 60%, 61%, 62%, 63%, 64%, 65%, 66%, 67%, 68%, 69%, 70%, 71%, 72%, 73%, 74%, 75%, 76%, 77%, 78%, 79%, 80%, 81%, 82%, 83%, 84%, 85%, 86%, 87%, 88%, 89%, 90%, 91%, 92%, 93%, 94%, 95%, 96%, 97%, 98%, 99%, or 100% sequence identity to any amino acid sequence according to SEQ ID NOs: 27-70. In some embodiments, the V_{H}-CDR2 comprises an amino acid sequence having at least 60%, 61%, 62%, 63%, 64%, 65%, 66%, 67%, 68%, 69%, 70%, 71%, 72%, 73%, 74%, 75%, 76%, 77%, 78%, 79%, 80%, 81%, 82%, 83%, 84%, 85%, 86%, 87%, 88%, 89%, 90%, 91%, 92%, 93%, 94%, 95%, 96%, 97%, 98%, 99%, or 100% sequence identity to any amino acid sequence according to SEQ ID NOs: 71-111, 801, 951, 952. In some embodiments, the V_{H}-CDR3 comprises an amino acid sequence having at least 60%, 61%, 62%, 63%, 64%, 65%, 66%, 67%, 68%, 69%, 70%, 71%, 72%, 73%, 74%, 75%, 76%, 77%, 78%, 79%, 80%, 81%, 82%, 83%, 84%, 85%, 86%, 87%, 88%, 89%, 90%, 91%, 92%, 93%, 94%, 95%, 96%, 97%, 98%, 99%, or 100% sequence identity to any amino acid sequence according to SEQ ID NOs: 112-169, 802, 953, 954. In some embodiments, the V_{L}-CDR1 comprises an amino acid sequence having at least 60%, 61%, 62%, 63%, 64%, 65%, 66%, 67%, 68%, 69%, 70%, 71%, 72%, 73%, 74%, 75%, 76%, 77%, 78%, 79%, 80%, 81%, 82%, 83%, 84%, 85%, 86%, 87%, 88%, 89%, 90%, 91%, 92%, 93%, 94%, 95%, 96%, 97%, 98%, 99%, or 100% sequence identity to any amino acid sequence according to SEQ ID NOs: 170-220. In some embodiments, the V_{L}-CDR2 comprises an amino acid sequence having at least 60%, 61%, 62%, 63%, 64%, 65%, 66%, 67%, 68%, 69%, 70%, 71%, 72%, 73%, 74%, 75%, 76%, 77%, 78%, 79%, 80%, 81%, 82%, 83%, 84%, 85%, 86%, 87%, 88%, 89%, 90%, 91%, 92%, 93%, 94%, 95%, 96%, 97%, 98%, 99%, or 100% sequence identity to any amino acid sequence according to SEQ ID NOs: 221-247. In some embodiments, the V_{L}-CDR3 comprises an amino acid sequence having at least 60%, 61%, 62%, 63%, 64%, 65%, 66%, 67%, 68%, 69%, 70%, 71%, 72%, 73%, 74%, 75%, 76%, 77%, 78%, 79%, 80%, 81%, 82%, 83%, 84%, 85%, 86%, 87%, 88%, 89%, 90%, 91%, 92%, 93%, 94%, 95%, 96%, 97%, 98%, 99%, or 100% sequence identity to any amino acid sequence according to SEQ ID NOs: 248-296. In some embodiments, the antibodies comprise one or more sequences having at least 80%, 81%, 82%, 83%, 84%, 85%, 86%, 87%, 88%, 89%, 90%, 91%, 92%, 93%, 94%, 95%, 96%, 97%, 98%, 99%, or 100% identity to a VL sequence, a VH sequence, a VL/VH pairing, and/or V_{H}-CDR1, V_{H}-CDR2, V_{H}-CDR3, V_{L}-CDR1, V_{L}-CDR2, V_{L}-CDR3 (including 1, 2, 3, 4, or 5 amino acid substitutions of any one or more of these CDRs) set from the heavy chain and light chain sequences as depicted in FIG. 25.

[0141] In some embodiments, antibodies or binding fragments thereof are provided. In some embodiments, the antibodies are anti-Gal3 antibodies or binding fragments thereof. In some embodiments, the anti-Gal3 antibodies or binding fragments thereof comprises a heavy chain variable region comprising a V_{H}-CDR1, a V_{H}-CDR2, and a V_{H}-CDR3. In some embodiments, the anti-Gal3 antibodies or binding fragments thereof comprise a light chain variable region comprising a V_{L}-CDR1, a V_{L}-CDR2, and a V_{L}-CDR3. In some embodiments, the V_{H}-CDR1 comprises an amino acid sequence having at least 60%, 61%, 62%, 63%, 64%, 65%, 66%, 67%, 68%, 69%, 70%, 71%, 72%, 73%, 74%, 75%, 76%, 77%, 78%, 79%, 80%, 81%, 82%, 83%, 84%, 85%, 86%, 87%, 88%, 89%, 90%, 91%, 92%, 93%, 94%, 95%, 96%, 97%, 98%, 99%, or 100% sequence similarity to any amino acid sequence according to SEQ ID NOs: 27-70. In some embodiments, the V_{H}-CDR2 comprises an amino acid sequence having at least 60%, 61%, 62%, 63%, 64%, 65%, 66%, 67%, 68%, 69%, 70%, 71%, 72%, 73%, 74%, 75%, 76%, 77%, 78%, 79%, 80%, 81%, 82%, 83%, 84%, 85%, 86%, 87%, 88%, 89%, 90%, 91%, 92%, 93%, 94%, 95%, 96%, 97%, 98%, 99%, or 100% sequence similarity to any amino acid sequence according to SEQ ID NOs: 71-111, 801, 951, 952. In some embodiments, the V_{H}-CDR3 comprises an amino acid sequence having at least 60%, 61%, 62%, 63%, 64%, 65%, 66%, 67%, 68%, 69%, 70%, 71%, 72%, 73%, 74%, 75%, 76%, 77%, 78%, 79%, 80%, 81%, 82%, 83%, 84%, 85%, 86%, 87%, 88%, 89%, 90%, 91%, 92%, 93%, 94%, 95%, 96%, 97%, 98%, 99%, or 100% sequence similarity to any amino acid sequence according to SEQ ID NOs: 112-169, 802, 953, 954. In some embodiments, the V_{L}-CDR1 comprises an amino acid sequence having at least 60%, 61%, 62%, 63%, 64%, 65%, 66%, 67%, 68%, 69%, 70%, 71%, 72%, 73%, 74%, 75%, 76%, 77%, 78%, 79%, 80%, 81%, 82%, 83%, 84%, 85%, 86%, 87%, 88%, 89%, 90%, 91%, 92%, 93%, 94%, 95%, 96%, 97%, 98%, 99%, or 100% sequence similarity to any amino acid sequence according to SEQ ID NOs: 170-220. In some embodiments, the V_{L}-CDR2 comprises an amino acid sequence having at least 60%, 61%, 62%, 63%, 64%, 65%, 66%, 67%, 68%, 69%, 70%, 71%, 72%, 73%, 74%, 75%, 76%, 77%, 78%, 79%, 80%, 81%, 82%, 83%, 84%, 85%, 86%, 87%, 88%, 89%, 90%, 91%, 92%, 93%, 94%, 95%, 96%, 97%, 98%, 99%, or 100% sequence similarity to any amino acid sequence according to SEQ ID NOs: 221-247. In some embodiments, the V_{L}-CDR3 comprises an amino acid sequence having at least 60%, 61%, 62%, 63%, 64%, 65%, 66%, 67%, 68%, 69%, 70%, 71%, 72%, 73%, 74%, 75%, 76%, 77%, 78%, 79%, 80%, 81%, 82%, 83%, 84%, 85%, 86%, 87%, 88%, 89%, 90%, 91%, 92%, 93%, 94%, 95%, 96%, 97%, 98%, 99%, or 100% sequence similarity to any amino acid sequence according to SEQ ID NOs: 248-296. In some embodiments, the antibodies comprise one or more sequences having at least 80%, 81%, 82%, 83%, 84%, 85%, 86%, 87%, 88%, 89%, 90%, 91%, 92%, 93%, 94%, 95%, 96%, 97%, 98%, 99%, or 100% similarity to a VL sequence, a VH sequence, a VL/VH pairing, and/or V_{H}-CDR1, V_{H}-CDR2, V_{H}-CDR3, V_{L}-CDR1, V_{L}-CDR2, V_{L}-CDR3 (including 1, 2, 3, 4, or 5 amino acid substitutions of any one or more of these CDRs) set from the heavy chain and light chain sequences as depicted in FIG. 25.

[0142] In some embodiments, antibodies or binding fragments thereof are provided. In some embodiments, the antibodies or binding fragments thereof are anti-Gal3 antibodies or binding fragments thereof. In some embodiments, the anti-Gal3 antibodies or binding fragments thereof comprises a heavy chain variable region comprising a V_{H}-CDR1, a V_{H}-CDR2, and a V_{H}-CDR3. In some embodiments, the anti-Gal3 antibodies or binding fragments thereof comprise a light chain variable region comprising a V_{L}-CDR1, a V_{L}-CDR2, and a VL-CDR3. In some embodiments, the V_{H}-CDR1 comprises an amino acid sequence having at least 0, 1, 2, 3, 4, 5, or 6 substitutions relative to any amino acid sequence according to SEQ ID NOs: 27-70. In some embodiments, the V_{H}-CDR2 comprises an amino acid sequence having at least 0, 1, 2, 3, 4, 5, or 6 substitutions relative to any amino acid sequence according to SEQ ID NOs: 71-111, 801, 951, 952. In some embodiments, the V_{H}-CDR3 comprises an amino acid sequence having at least 0, 1, 2, 3, 4, 5, or 6 substitutions relative to any amino acid sequence according to SEQ ID NOs: 112-169, 802, 953, 954. In some embodiments, the V_{L}-CDR1 comprises an amino acid sequence having at least 0, 1, 2, 3, 4, 5, or 6 substitutions relative to any amino acid sequence according to SEQ ID NOs: 170-220. In some embodiments, the V_{L}-CDR2 comprises an amino acid sequence having at least 0, 1, 2, 3, 4, 5, or 6 substitutions relative to any amino acid sequence according to SEQ ID NOs: 221-247. In some embodiments, the V_{L}-CDR3 comprises an amino acid sequence having at least 0, 1, 2, 3, 4, 5, or 6 substitutions relative to any amino acid sequence according to SEQ ID NOs: 248-296.

[0143] In some embodiments, the antibody or binding fragment thereof comprises a combination of a V_{L}-CDR1, a V_{L}-CDR2, a V_{L}-CDR3, a V_{H}-CDR1, a V_{H}-CDR2, and a V_{H}-CDR3 as illustrated in FIG. 23.

[0144] In some embodiments, the antibody or binding fragment thereof comprises a combination of a V_{H}-CDR1, a V_{H}-CDR2, a V_{H}-CDR3, V_{L}-CDR1, a V_{L}-CDR2, and a V_{L}-CDR3, where one or more of these CDRs is defined by a consensus sequence. The consensus sequences provided herein have been derived from the alignments of CDRs depicted in FIG. 37A-B. However, it is envisioned that alternative alignments may be done (e.g. using global or local alignment, or with different algorithms, such as Hidden Markov Models, seeded guide trees, Needleman-Wunsch algorithm, or Smith-Waterman algorithm) and as such, alternative consensus sequences can be derived.

[0145] In some embodiments, the V_{H}-CDR1 is defined by the formula X₁X₂X₃X₄X₅X₆X₇X₈X₉X₁₀, where X₁ is E, G, or R; X₂ is F, N, or Y; X₃ is A, I, K, N, S, or T; X₄ is F, I, or L; X₅ is I, K, N, R, S, or T; X₆ is D, G, I, N, S, or T; X₇ is F, G, H, S, or Y; X₈ is no amino acid, A, D, G, I, M, N, T, V, W, or Y; X₉ is no amino acid, M, or Y; X₁₀ is no amino acid or G; In some embodiments, the V_{H}-CDR1 comprises a sequence having at least 80%, 81%, 82%, 83%, 84%, 85%, 86%, 87%, 88%, 89%, 90%, 91%, 92%, 93%, 94%, 95%, 96%, 97%, 98%, 99%, or 100% identity to this consensus sequence. In some embodiments, the V_{H}-CDR1 comprises a sequence having 0, 1, 2, 3, 4, 5, or 6 substitutions from this consensus sequence.

[0146] In some embodiments, the V_{H}-CDR2 is defined by the formula X₁X₂X₃X₄X₅X₆X₇X₈X₉X₁₀, where X₁ is no amino acid, I, or L; X₂ is no amino acid or R; X₃ is no amino acid, F, I, L, or V; X₄ is A, D, F, H, K, L, N, S, W, or Y; X₅ is A, D, P, S, T, W, or Y; X₆ is D, E, G, H, K, N, S, V, or Y; X₇ is D, E, G, N, S, or T; X₈ is D, G, I, K, N, Q, R, S, V, or Y; X₉ is A, D, E, G, I, K, N, P, S, T, V, or Y; X₁₀ is no amino acid, I, P, S, or T. In some embodiments, the V_{H}-CDR2 comprises a sequence having at least 80%, 81%, 82%, 83%, 84%, 85%, 86%, 87%, 88%, 89%, 90%, 91%, 92%, 93%, 94%, 95%, 96%, 97%, 98%, 99%, or 100% identity to this consensus sequence. In some embodiments, the V_{H}-CDR2 comprises a sequence having 0, 1, 2, 3, 4, 5, or 6 substitutions from this consensus sequence.

[0147] In some embodiments, the V_{H}-CDR3 is defined by the formula X₁X₂X₃X₄X₅X₆X₇X₈X₉X₁₀X₁X₁₂X₁₃X₁₄X₁₅X₁₆X₁₇X₁₈X₁₉X₂₀X₂₁X₂₂X₂₃X₂₄X₂₅, where X₁ is no amino acid or A; X₂ is no amino acid, A, R, or Y; X₃ is no amino acid, A, F, H, K, L, R, S, or V; X₄ is no amino acid, A, D, K, N, R, S, or T; X₅ is no amino acid, A, D, G, H, I, L, N, P, R, S, T, V, or Y; X₆ is no amino acid, A, D, G, H, K, N, P, Q, R, S, or Y; X₇ is no amino acid, D, F, G, H, P, R, S, W, or Y; X₈ is no amino acid, A, D, E, G, I, R, or S; X₉ is no amino acid, A, C, D, E, F, G, I, N, R, S, T, V, or Y; X₁₀ is no amino acid, A, D, M, P, R, S, T, V, or Y; X₁₁ is no amino acid, A, D, E, F, L, T, V, or Y; X₁₂ is no amino acid, A, G, L, M, R, or T; X₁₃ is no amino acid, A, D, E, F, G, R, S, T, or V; X₁₄ is no amino acid, A, D, G, L, P, Q, R, S, T, V, or Y; X₁₅ is no amino acid, A, D, G, N, S, V, W, or Y; X₁₆ is no amino acid, A, D, E, F, L, P, T, V, W, or Y; X₁₇ is no amino acid, F, I, L, M, R, or Y; X₁₈ is no amino acid, A, D, G, N, or T; X₁₉ is no amino acid, F, N, S, T, V, or Y; X₂₀ is no amino acid or L; X₂₁ is no amino acid or A; X₂₂ is no amino acid or W; X₂₃ is no amino acid or F; X₂₄ is no amino acid or A; X₂₅ is no amino acid or Y. In some embodiments, the V_{H}-CDR3 comprises a sequence having at least 80%, 81%, 82%, 83%, 84%, 85%, 86%, 87%, 88%, 89%, 90%, 91%, 92%, 93%, 94%, 95%, 96%, 97%, 98%, 99%, or 100% identity to this consensus sequence. In some embodiments, the V_{H}-CDR3 comprises a sequence having 0, 1, 2, 3, 4, 5, or 6 substitutions from this consensus sequence.

[0148] In some embodiments, the V_{L}-CDR1 is defined by the formula X₁X₂X₃X₄X₅X₆X₇X₈X₉X₁₀X₁₁X₁₂X₁₃X₁₄X₁₅X₁₆X₁₇, where X₁ is no amino acid or R; X₂ is no amino acid or S; X₃ is no amino acid, S, or T; X₄ is no amino acid, E, G, K, Q, or R; X₅ is no amino acid, A, D, G, I, N, or S; X₆ is no amino acid, I, L, or V; X₇ is no amino acid, F, L, S, or V; X₈ is no amino acid, D, E, H, N, S, T, or Y; X₉ is no amino acid, D, E, I, K, N, R, S, T, or V; X₁₀ is no amino acid, D, H, N, R, S, or Y; X₁₁ is no amino acid, A, G, N, S, T, or V; X₁₂ is no amino acid, A, I, K, N, Q, T, V, or Y; X₁₃ is no amino acid, D, G, H, K, N, S, T, or Y; X₁₄ is no amino acid, C, F, I, N, S, T, V, or Y; X₁₅ is no amino acid, D, L, N, W, or Y; X₁₆ is no amino acid, N, or D; X₁₇ is no amino acid or D. In some embodiments, the V_{L}-CDR1 comprises a sequence having at least 80%, 81%, 82%, 83%, 84%, 85%, 86%, 87%, 88%, 89%, 90%, 91%, 92%, 93%, 94%, 95%, 96%, 97%, 98%, 99%, or 100% identity to this consensus sequence. In some embodiments, the V_{L}-CDR1 comprises a sequence having 0, 1, 2, 3, 4, 5, or 6 substitutions from this consensus sequence.

[0149] In some embodiments, the V_{L}-CDR2 is defined by the formula X₁X₂X₃X₄X₅X₆X₇X₈, where X₁ is no amino acid, K, L, N, Q, or R; X₂ is no amino acid, A, L, M, or V; X₃ is no amino acid, C, K, or S; X₄ is no amino acid or T; X₅ is no amino acid, A, E, F, G, H, K, Q, R, S, W, or Y; X₆ is no amino acid, A, G, or T; X₇ is no amino acid, I, K, N, S, or T; X₈ is no amino acid, N, or S. In some embodiments, the V_{L}-CDR2 comprises a sequence having at least 80%, 81%, 82%, 83%, 84%, 85%, 86%, 87%, 88%, 89%, 90%, 91%, 92%, 93%, 94%, 95%, 96%, 97%, 98%, 99%, or 100% identity to this consensus sequence. In some embodiments, the V_{L}-CDR2 comprises a sequence having 0, 1, 2, 3, 4, 5, or 6 substitutions from this consensus sequence.

[0150] In some embodiments, the V_{L}-CDR3 is defined by the formula X₁X₂X₃X₄X₅X₆X₇X₈X₉X₁₀, where X₁ is no amino acid, A, E, F, H, L, M, Q, S, V, or W; X₂ is A, H, or Q; X₃ is D, F, G, H, L, M, N, Q, S, T, W, or Y; X₄ is no amino acid or W; X₅ is A, D, I, K, L, N, Q, R, S, T, V, or Y; X₆ is D, E, H, I, K, L, N, Q, S, or T; X₇ is D, F, K, L, N, P, S, T, V, W, or Y; X₈ is H, P, or S; X₉ is F, L, P, Q, R, T, W, or Y; X₁₀ is no amino acid, T, or V. In some embodiments, the V_{L}-CDR3 comprises a sequence having at least 80%, 81%, 82%, 83%, 84%, 85%, 86%, 87%, 88%, 89%, 90%, 91%, 92%, 93%, 94%, 95%, 96%, 97%, 98%, 99%, or 100% identity to this consensus sequence. In some embodiments, the V_{L}-CDR3 comprises a sequence having 0, 1, 2, 3, 4, 5, or 6 substitutions from this consensus sequence.

[0151] In some embodiments, the heavy chain variable region of the anti-Gal3 antibody or binding fragment thereof comprises a sequence having at least 80%, 81%, 82%, 83%, 84%, 85%, 86%, 87%, 88%, 89%, 90%, 91%, 92%, 93%, 94%, 95%, 96%, 97%, 98%, 99%, or 100% identity to the sequence selected from SEQ ID NOs: 297-373, 803, 806-820, 940, 955-968, 1067-1109, 1415-1439. In some embodiments, the light chain variable region of the antibody or binding fragment thereof comprises a sequence having at least 80%, 81%, 82%, 83%, 84%, 85%, 86%, 87%, 88%, 89%, 90%, 91%, 92%, 93%, 94%, 95%, 96%, 97%, 98%, 99%, or 100% identity to the sequence selected from SEQ ID NOs: 374-447, 821-835, 941-943, 969-982, 1110-1152, 1440-1464. In some embodiments, the antibodies or binding fragments thereof are anti-Gal3 antibodies or binding fragments thereof.

[0152] In some embodiments, the heavy chain variable region of the anti-Gal3 antibody or binding fragment thereof comprises a sequence having at least 80%, 81%, 82%, 83%, 84%, 85%, 86%, 87%, 88%, 89%, 90%, 91%, 92%, 93%, 94%, 95%, 96%, 97%, 98%, 99%, or 100% similarity to the sequence selected from SEQ ID NOs: 297-373, 803, 806-820, 940, 955-968, 1067-1109, 1415-1439. In some embodiments, the light chain variable region of the antibody or binding fragment thereof comprises a sequence having at least 80%, 81%, 82%, 83%, 84%, 85%, 86%, 87%, 88%, 89%, 90%, 91%, 92%, 93%, 94%, 95%, 96%, 97%, 98%, 99%, or 100% similarity to the sequence selected from SEQ ID NOs: 374-447, 821-835, 941-943, 969-982, 1110-1152, 1440-1464. In some embodiments, the antibodies or binding fragments thereof are anti-Gal3 antibodies or binding fragments thereof.

[0153] In some embodiments, the antibodies comprise one or more sequences having at least 80%, 81%, 82%, 83%, 84%, 85%, 86%, 87%, 88%, 89%, 90%, 91%, 92%, 93%, 94%, 95%, 96%, 97%, 98%, 99%, or 100% identity to a VL sequence, a V_{H} sequence, a VL/VH pairing, and/or V_{L}-CDR1, V_{L}-CDR2, V_{L}-CDR3, V_{H}-CDR1, V_{H}-CDR2, V_{H}-CDR3 (including 1, 2, 3, 4, or 5 amino acid substitutions of any one or more of these CDRs) set from the heavy chain and light chain sequences as depicted in FIG. 25.

[0154] In some embodiments, antibodies or binding fragments thereof are provided. In some embodiments, the antibodies are anti-Gal3 antibodies or binding fragments thereof. In some embodiments, the anti-Gal3 antibodies or binding fragments thereof comprises a heavy chain variable region comprising a V_{H}-CDR1, a V_{H}-CDR2, and a V_{H}-CDR3. In some embodiments, the anti-Gal3 antibodies or binding fragments thereof comprise a light chain variable region comprising a V_{L}-CDR1, a V_{L}-CDR2, and a V_{L}-CDR3. In some embodiments, the V_{H}-CDR1 comprises one of the amino acid sequences of SEQ ID NOs: 27-70, the V_{H}-CDR2 comprises one of the amino acid sequences of SEQ ID NOs: 71-111, 801, 951, 952, the V_{H}-CDR3 comprises one of the amino acid sequences of SEQ ID NO: 112-169, 802, 953, 954, the V_{L}-CDR1 comprises one of the amino acid sequences of SEQ ID NOs: 170-220, the V_{L}-CDR2 comprises one of the amino acid sequences of SEQ ID NOs: 211-247, the V_{L}-CDR3 comprises one of the amino acid sequences of SEQ ID NOs: 248-296, the heavy chain variable region has a sequence having at least 80%, 81%, 82%, 83%, 84%, 85%, 86%, 87%, 88%, 89%, 90%, 91%, 92%, 93%, 94%, 95%, 96%, 97%, 98%, 99%, or 100% identity to one of the amino acid sequences of SEQ ID NOs: 297-373, 803, 806-820, 940, 955-968, 1067-1109, 1415-1439, and the light chain variable region has a sequence having at least 80%, 81%, 82%, 83%, 84%, 85%, 86%, 87%, 88%, 89%, 90%, 91%, 92%, 93%, 94%, 95%, 96%, 97%, 98%, 99%, or 100% identity to one of the amino acid sequences of SEQ ID NOs: 374-447, 821-835, 941-943, 969-982,1110-1152, 1440-1464.

[0155] In some embodiments, the anti-Gal3 antibody or binding fragment thereof comprises a heavy chain, wherein the heavy chain comprises a sequence having at least 80%, 81%, 82%, 83%, 84%, 85%, 86%, 87%, 88%, 89%, 90%, 91%, 92%, 93%, 94%, 95%, 96%, 97%, 98%, 99%, or 100% identity to the sequence selected from SEQ ID NOs: 448-494, 804, 836-850, 983-996, 1153-1195, 1411, 1465-1489. In some embodiments, the antibody or binding fragment thereof comprises a light chain, wherein the light chain comprises a sequence having at least 80%, 81%, 82%, 83%, 84%, 85%, 86%, 87%, 88%, 89%, 90%, 91%, 92%, 93%, 94%, 95%, 96%, 97%, 98%, or 99% identity to the sequence selected from SEQ ID NOs: 495-538, 805, 851-865, 997-1010, 1196-1238, 1412, 1490-1514. In some embodiments, the antibodies or binding fragments thereof are anti-Gal3 antibodies or binding fragments thereof.

[0156] In some embodiments, the anti-Gal3 antibody or binding fragment thereof comprises a heavy chain, wherein the heavy chain comprises a sequence having at least 80%, 81%, 82%, 83%, 84%, 85%, 86%, 87%, 88%, 89%, 90%, 91%, 92%, 93%, 94%, 95%, 96%, 97%, 98%, 99%, or 100% similarity to the sequence selected from SEQ ID NOs: 448-494, 804, 836-850, 983-996, 1153-1195, 1411, 1465-1489. In some embodiments, the antibody or binding fragment thereof comprises a light chain, wherein the light chain comprises a sequence having at least 80%, 81%, 82%, 83%, 84%, 85%, 86%, 87%, 88%, 89%, 90%, 91%, 92%, 93%, 94%, 95%, 96%, 97%, 98%, or 99% similarity to the sequence selected from SEQ ID NOs: 495-538, 805, 851-865, 997-1010, 1196-1238, 1412, 1490-1514. In some embodiments, the antibodies or binding fragments thereof are anti-Gal3 antibodies or binding fragments thereof.

[0157] In some embodiments, antibodies or binding fragments thereof are provided. In some embodiments, the antibodies are anti-Gal3 antibodies or binding fragments thereof. In some embodiments, the anti-Gal3 antibodies or binding fragments thereof comprise a heavy chain variable region and a light chain variable region. In some embodiments, the heavy chain variable region is paired with an IgG4 heavy chain constant domain, an IgG2 heavy chain constant domain, or an IgG1 heavy chain constant domain. In some embodiments, the IgG4 heavy chain constant domain, IgG2 heavy chain constant domain, or the IgG1 heavy chain constant domain are human or murine. In some embodiments, the IgG4 heavy chain constant domain comprises a sequence having at least 80%, 81%, 82%, 83%, 84%, 85%, 86%, 87%, 88%, 89%, 90%, 91%, 92%, 93%, 94%, 95%, 96%, 97%, 98%, 99%, or 100% identity to SEQ ID NO: 945. In some embodiments, the IgG4 heavy chain constant domain is an S228P mutant. In some embodiments, the IgG2 heavy chain constant domain comprises a sequence having at least 80%, 81%, 82%, 83%, 84%, 85%, 86%, 87%, 88%, 89%, 90%, 91%, 92%, 93%, 94%, 95%, 96%, 97%, 98%, 99%, or 100% identity to SEQ ID NO: 947 or SEQ ID NO: 948. In some embodiments, the IgG2 heavy chain constant domain is a LALAPG or a LALA mutant. In some embodiments, the IgG1 heavy chain constant domain is a KEM, REM, or LALAPGv2 mutant. In some embodiments, the IgG1 heavy chain constant domain comprises a sequence having at least 80%, 81%, 82%, 83%, 84%, 85%, 86%, 87%, 88%, 89%, 90%, 91%, 92%, 93%, 94%, 95%, 96%, 97%, 98%, 99%, or 100% identity to SEQ ID NO: 1615, 1616, or 1617. In some embodiments, the light chain variable region is paired with an IgG4 kappa chain constant domain. In some embodiments, the IgG4 kappa chain constant domain comprises a sequence having at least 80%, 81%, 82%, 83%, 84%, 85%, 86%, 87%, 88%, 89%, 90%, 91%, 92%, 93%, 94%, 95%, 96%, 97%, 98%, 99%, or 100% identity to SEQ ID NO: 946. In some embodiments, the light chain variable region and/or heavy chain variable region may be selected from those depicted in FIGS. 21 and 22 and/or the combinations of light chain variable region and heavy chain variable region as depicted in FIG. 24. In some embodiments, the light chain variable region and/or heavy chain variable regions comprise one or more CDRs depicted in FIGS. 19A-C, 20A-C and/or the combinations of CDRs depicted in FIG. 23.

[0158] In some embodiments, the antibody or binding fragment thereof is selected from the group consisting of: TB001, TB006, 12G5.D7, 13A12.2E5, 14H10.2C9, 15F10.2D6, 19B5.2E6, 20D11.2C6, 20H5.A3, 23H9.2E4, 2D10.2B2, 3B11.2G2, 7D8.2D8, mIMT001, 4A11.2B5, 4A11.H1L1, 4A11.H4L2, 4G2.2G6, 6B3.2D3, 6H6.2D6, 9H2.2H10, 13G4.2F8, 13H12.2F8, 15G7.2A7, 19D9.2E5, 23B10.2B12, 24D12.2H9, F846C.1B2, F846C.1F5, F846C.1H12, F846C.1H5, F846C.2H3, F846TC.14A2, F846TC.14E4, F846TC.16B5, F846TC.7F10, F847C.10B9, F847C.11B1, F847C.12F12, F847C.26F5, F847C.4B10, F849C.8D10, F849C.8H3, 846.2B11, 846.4D5, 846T.1H2, 847.14H4, 846.2D4, 846.2F11, 846T.10B1, 846T.2E3, 846T.4C9, 846T.4E11, 846T.4F5, 846T.8D1, 847.10C9, 847.11D6, 847.15D12, 847.15F9, 847.15H11, 847.20H7, 847.21B11, 847.27B9, 847.28D1, 847.2B8, 847.3B3, 849.1D2, 849.2D7, 849.2F12, 849.4B2, 849.4F12, 849.4F2, 849.5C2, 849.8D12, F847C.21H6, 849.5H1, 847.23F11, 847.16D10, 847.13E2-mH0mL1, 847.13E2-mH0mL2, 847.12C4, 847.4D3, 2D10-VH0-VL0, 2D10-hVH4-HVL1, 2D10-hVH4-HVL2, 2D10-hVH4-HVL3, 2D10-hVH4-HVL4, 2D10-hVH3-HVL1, 2D10-hVH3-HVL2, 2D10-hVH3-HVL3, 2D10-hVH3-HVL4, 20H5.A3-VH3VL1, 20H5.A3-VH3VL3, 20H5.A3-VH4VL1, 20H5.A3-VH5VL1, 20H5.A3-VH5VL3, 20H5.A3-VH6VL1, 20H5.A3-VH6VL3, or binding fragment thereof.

[0159] In some embodiments, the antibody or binding fragment thereof is selected from the group consisting of: TB001, TB006, 12G5.D7, 13A12.2E5, 14H10.2C9, 15F10.2D6, 19B5.2E6, 20D11.2C6, 20H5.A3, 23H9.2E4, 2D10.2B2, 3B11.2G2, 7D8.2D8, mIMT001, 4A11.2B5, 4A11.H1L1, 4A11.H4L2, 4G2.2G6, 6B3.2D3, 6H6.2D6, 9H2.2H10, 13G4.2F8, 13H12.2F8, 15G7.2A7, 19D9.2E5, 23B10.2B12, 24D12.2H9, F846C.1B2, F846C.1F5, F846C.1H12, F846C.1H5, F846C.2H3, F846TC.14A2, F846TC.14E4, F846TC.16B5, F846TC.7F10, F847C.10B9, F847C.11B1, F847C.12F12, F847C.26F5, F847C.4B10, F849C.8D10, F849C.8H3, 846.2B11, 846.4D5, 846T.1H2, 847.14H4, 846.2D4, 846.2F11, 846T.10B1, 846T.2E3, 846T.4C9, 846T.4E11, 846T.4F5, 846T.8D1, 847.10C9, 847.11D6, 847.15D12, 847.15F9, 847.15H11, 847.20H7, 847.21B11, 847.27B9, 847.28D1, 847.2B8, 847.3B3, 849.1D2, 849.2D7, 849.2F12, 849.4B2, 849.4F12, 849.4F2, 849.5C2, 849.8D12, F847C.21H6, 849.5H1, 847.23F11, 847.16D10, 847.13E2-mH0mL1, 847.13E2-mH0mL2, 847.12C4, 847.4D3, 2D10-VH0-VL0, 2D10-hVH4-HVL1, 2D10-hVH4-HVL2, 2D10-hVH4-HVL3, 2D10-hVH4-HVL4, 2D10-hVH3-HVL1, 2D10-hVH3-HVL2, 2D10-hVH3-HVL3, 2D10-hVH3-HVL4, 20H5.A3-VH3VL1, 20H5.A3-VH3VL3, 20H5.A3-VH4VL1, 20H5.A3-VH5VL1, 20H5.A3-VH5VL3, 20H5.A3-VH6VL1, 20H5.A3-VH6VL3, 2D10.2B2-v2, 2D10-VH0-NDA-VL0, 2D10-VH0-QDT-VL0, 2D10-VH0-SDT-VL0, 2D10-VH0-v1-QDT, 2D10-VH0-v2-QDT, 2D10-hVH1-hVL1, 2D10-hVH1-hVL2, 2D10-hVH1-hVL3, 2D10-hVH1-hVL4, 2D10-hVH2-hVL1, 2D10-hVH2-hVL2, 2D10-hVH2-hVL3, 2D10-hVH2-hVL4, 20H5.A3-hIgG4(S228P), 20H5.A3-hIgG4(S228P)-mv2, 798-9.20H5.A3-mH0mL1, 798-9.20H5.A3-mH1mL0, 798-9.20H5.A3-mH1mL1, 798-9.20H5.A3-mH2mL0, 798-9.20H5.A3-mH2mL1, 20H5.A3-VH1VL1, 20H5.A3-VH1VL2, 20H5.A3-VH1VL3, 20H5.A3-VH1VL4, 20H5.A3-VH1VL5, 20H5.A3-VH1VL6, 20H5.A3-VH2VL3, 20H5.A3-VH2VL4, 20H5.A3-VH2VL5, 20H5.A3-VH2VL6, 20H5.A3-VH3VL5, 20H5.A3-VH3VL6, 20H5.A3-VH4VL3, 20H5.A3-VH4VL4, 20H5.A3-VH4VL5, 20H5.A3-VH4VL6, 20H5.A3-VH5VL5, 20H5.A3-VH5VL6, 20H5.A3-VH6VL4, 20H5.A3-VH6VL5, 20H5.A3-VH6VL6, 20H5.A3-VH7VL1, 20H5.A3-VH7VL2, 20H5.A3-VH7VL3, 20H5.A3-VH7VL4, 20H5.A3-VH7VL5, 20H5.A3-VH7VL6, 20H5.A3_hVH3VL1-hIgG1 (KEMv2), 20H5.A3_hVH3VL1-hIgG1 (LALAPGv2), 20H5.A3_hVH3VL1-hIgG1 (REM), 20H5.A3_hVH5VL1-hIgG1 (KEMv2), 20H5.A3_hVH5VL1-hIgG1 (LALAPGv2), 20H5.A3_hVH5VL1-hIgG1 (REM), 20H5.A3_hVH6VL1-hIgG1 (KEMv2), 20H5.A3_hVH6VL1-hIgG1 (LALAPGv2), 20H5.A3_hVH6VL1-hIgG1 (REM), 21H6-H0L0, 21H6-H1L1, 21H6-H1L2, 21H6-H1L3, 21H6-H1L4, 21H6-H2L1, 21H6-H2L2, 21H6-H2L3, 21H6-H2L4, 21H6-H3L1, 21H6-H3L2, 21H6-H3L3, 21H6-H3L4, 21H6-H4L1, 21H6-H4L2, 21H6-H4L3, 21H6-H4L4, 21H6-H5L1, 21H6-H5L2, 21H6-H5L3, 21H6-H5L4, 21H6-H6L1, 21H6-H6L2, 21H6-H6L3, 21H6-H6L4, or binding fragment thereof.

[0160] In some embodiments, the antibody or binding fragment thereof comprises a sequence (e.g. CDR, VL, VH, LC, HC) having at least 80%, 81%, 82%, 83%, 84%, 85%, 86%, 87%, 88%, 89%, 90%, 91%, 92%, 93%, 94%, 95%, 96%, 97%, 98%, 99%, or 100% sequence identity to a sequence of TB001, TB006, 12G5.D7, 13A12.2E5, 14H10.2C9, 15F10.2D6, 19B5.2E6, 20D11.2C6, 20H5.A3, 23H9.2E4, 2D10.2B2, 3B11.2G2, 7D8.2D8, mIMT001, 4A11.2B5, 4A11.H1L1, 4A11.H4L2, 4G2.2G6, 6B3.2D3, 6H6.2D6, 9H2.2H10, 13G4.2F8, 13H12.2F8, 15G7.2A7, 19D9.2E5, 23B10.2B12, 24D12.2H9, F846C.1B2, F846C.1F5, F846C.1H12, F846C.1H5, F846C.2H3, F846TC.14A2, F846TC.14E4, F846TC.16B5, F846TC.7F10, F847C.10B9, F847C.11B1, F847C.12F12, F847C.26F5, F847C.4B10, F849C.8D10, F849C.8H3, 846.2B11, 846.4D5, 846T.1H2, 847.14H4, 846.2D4, 846.2F11, 846T.10B1, 846T.2E3, 846T.4C9, 846T.4E11, 846T.4F5, 846T.8D1, 847.10C9, 847.11D6, 847.15D12, 847.15F9, 847.15H11, 847.20H7, 847.21B11, 847.27B9, 847.28D1, 847.2B8, 847.3B3, 849.1D2, 849.2D7, 849.2F12, 849.4B2, 849.4F12, 849.4F2, 849.5C2, 849.8D12, F847C.21H6, 849.5H1, 847.23F11, 847.16D10, 847.13E2-mH0mL1, 847.13E2-mH0mL2, 847.12C4, 847.4D3, 2D10-VH0-VL0, 2D10-hVH4-HVL1, 2D10-hVH4-HVL2, 2D10-hVH4-HVL3, 2D10-hVH4-HVL4, 2D10-hVH3-HVL1, 2D10-hVH3-HVL2, 2D10-hVH3-HVL3, 2D10-hVH3-HVL4, 20H5.A3-VH3VL1, 20H5.A3-VH3VL3, 20H5.A3-VH4VL1, 20H5.A3-VH5VL1, 20H5.A3-VH5VL3, 20H5.A3-VH6VL1, 20H5.A3-VH6VL3, 2D10.2B2-v2, 2D10-VH0-NDA-VL0, 2D10-VH0-QDT-VL0, 2D10-VH0-SDT-VL0, 2D10-VH0-v1-QDT, 2D10-VH0-v2-QDT, 2D10-hVH1-hVL1, 2D10-hVH1-hVL2, 2D10-hVH1-hVL3, 2D10-hVH1-hVL4, 2D10-hVH2-hVL1, 2D10-hVH2-hVL2, 2D10-hVH2-hVL3, 2D10-hVH2-hVL4, 20H5.A3-hIgG4(S228P), 20H5.A3-hIgG4(S228P)-mv2, 798-9.20H5.A3-mH0mL1, 798-9.20H5.A3-mH1mL0, 798-9.20H5.A3-mH1mL1, 798-9.20H5.A3-mH2mL0, 798-9.20H5.A3-mH2mL1, 20H5.A3-VH1VL1, 20H5.A3-VH1VL2, 20H5.A3-VH1VL3, 20H5.A3-VH1VL4, 20H5.A3-VH1VL5, 20H5.A3-VH1VL6, 20H5.A3-VH2VL3, 20H5.A3-VH2VL4, 20H5.A3-VH2VL5, 20H5.A3-VH2VL6, 20H5.A3-VH3VL5, 20H5.A3-VH3VL6, 20H5.A3-VH4VL3, 20H5.A3-VH4VL4, 20H5.A3-VH4VL5, 20H5.A3-VH4VL6, 20H5.A3-VH5VL5, 20H5.A3-VH5VL6, 20H5.A3-VH6VL4, 20H5.A3-VH6VL5, 20H5.A3-VH6VL6, 20H5.A3-VH7VL1, 20H5.A3-VH7VL2, 20H5.A3-VH7VL3, 20H5.A3-VH7VL4, 20H5.A3-VH7VL5, 20H5.A3-VH7VL6, 20H5.A3_hVH3VL1-hIgG1 (KEMv2), 20H5.A3_hVH3VL1-hIgG1 (LALAPGv2), 20H5.A3_hVH3VL1-hIgG1 (REM), 20H5.A3_hVH5VL1-hIgG1 (KEMv2), 20H5.A3_hVH5VL1-hIgG1 (LALAPGv2), 20H5.A3_hVH5VL1-hIgG1 (REM), 20H5.A3_hVH6VL1-hIgG1 (KEMv2), 20H5.A3_hVH6VL1-hIgG1 (LALAPGv2), 20H5.A3_hVH6VL1-hIgG1 (REM), 21H6-H0L0, 21H6-H1L1, 21H6-H1L2, 21H6-H1L3, 21H6-H1L4, 21H6-H2L1, 21H6-H2L2, 21H6-H2L3, 21H6-H2L4, 21H6-H3L1, 21H6-H3L2, 21H6-H3L3, 21H6-H3L4, 21H6-H4L1, 21H6-H4L2, 21H6-H4L3, 21H6-H4L4, 21H6-H5L1, 21H6-H5L2, 21H6-H5L3, 21H6-H5L4, 21H6-H6L1, 21H6-H6L2, 21H6-H6L3, 21H6-H6L4, or binding fragment thereof.

[0161] In some embodiments, the antibody or binding fragment thereof comprises a sequence (e.g. CDR, VL, VH, LC, HC) having at least 80%, 81%, 82%, 83%, 84%, 85%, 86%, 87%, 88%, 89%, 90%, 91%, 92%, 93%, 94%, 95%, 96%, 97%, 98%, 99%, or 100% sequence similarity to a sequence of TB001, TB006, 12G5.D7, 13A12.2E5, 14H10.2C9, 15F10.2D6, 19B5.2E6, 20D11.2C6, 20H5.A3, 23H9.2E4, 2D10.2B2, 3B11.2G2, 7D8.2D8, mIMT001, 4A11.2B5, 4A11.H1L1, 4A11.H4L2, 4G2.2G6, 6B3.2D3, 6H6.2D6, 9H2.2H10, 13G4.2F8, 13H12.2F8, 15G7.2A7, 19D9.2E5, 23B10.2B12, 24D12.2H9, F846C.1B2, F846C.1F5, F846C.1H12, F846C.1H5, F846C.2H3, F846TC.14A2, F846TC.14E4, F846TC.16B5, F846TC.7F10, F847C.10B9, F847C.11B1, F847C.12F12, F847C.26F5, F847C.4B10, F849C.8D10, F849C.8H3, 846.2B11, 846.4D5, 846T.1H2, 847.14H4, 846.2D4, 846.2F11, 846T.10B1, 846T.2E3, 846T.4C9, 846T.4E11, 846T.4F5, 846T.8D1, 847.10C9, 847.11D6, 847.15D12, 847.15F9, 847.15H11, 847.20H7, 847.21B11, 847.27B9, 847.28D1, 847.2B8, 847.3B3, 849.1D2, 849.2D7, 849.2F12, 849.4B2, 849.4F12, 849.4F2, 849.5C2, 849.8D12, F847C.21H6, 849.5H1, 847.23F11, 847.16D10, 847.13E2-mH0mL1, 847.13E2-mH0mL2, 847.12C4, 847.4D3, 2D10-VH0-VL0, 2D10-hVH4-HVL1, 2D10-hVH4-HVL2, 2D10-hVH4-HVL3, 2D10-hVH4-HVL4, 2D10-hVH3-HVL1, 2D10-hVH3-HVL2, 2D10-hVH3-HVL3, 2D10-hVH3-HVL4, 20H5.A3-VH3VL1, 20H5.A3-VH3VL3, 20H5.A3-VH4VL1, 20H5.A3-VH5VL1, 20H5.A3-VH5VL3, 20H5.A3-VH6VL1, 2D10.2B2-v2, 2D10-VH0-NDA-VL0, 2D10-VH0-QDT-VL0, 2D10-VH0-SDT-VL0, 2D10-VH0-v1-QDT, 2D10-VH0-v2-QDT, 2D10-hVH1-hVL1, 2D10-hVH1-hVL2, 2D10-hVH1-hVL3, 2D10-hVH1-hVL4, 2D10-hVH2-hVL1, 2D10-hVH2-hVL2, 2D10-hVH2-hVL3, 2D10-hVH2-hVL4, 20H5.A3-hIgG4(S228P), 20H5.A3-hIgG4(S228P)-mv2, 798-9.20H5.A3-mH0mL1, 798-9.20H5.A3-mH1mL0, 798-9.20H5.A3-mH1mL1, 798-9.20H5.A3-mH2mL0, 798-9.20H5.A3-mH2mL1, 20H5.A3-VH1VL1, 20H5.A3-VH1VL2, 20H5.A3-VH1VL3, 20H5.A3-VH1VL4, 20H5.A3-VH1VL5, 20H5.A3-VH1VL6, 20H5.A3-VH2VL3, 20H5.A3-VH2VL4, 20H5.A3-VH2VL5, 20H5.A3-VH2VL6, 20H5.A3-VH3VL5, 20H5.A3-VH3VL6, 20H5.A3-VH4VL3, 20H5.A3-VH4VL4, 20H5.A3-VH4VL5, 20H5.A3-VH4VL6, 20H5.A3-VH5VL5, 20H5.A3-VH5VL6, 20H5.A3-VH6VL4, 20H5.A3-VH6VL5, 20H5.A3-VH6VL6, 20H5.A3-VH7VL1, 20H5.A3-VH7VL2, 20H5.A3-VH7VL3, 20H5.A3-VH7VL4, 20H5.A3-VH7VL5, 20H5.A3-VH7VL6, 20H5.A3_hVH3VL1-hIgG1 (KEMv2), 20H5.A3_hVH3VL1-hIgG1 (LALAPGv2), 20H5.A3_hVH3VL1-hIgG1 (REM), 20H5.A3_hVH5VL1-hIgG1 (KEMv2), 20H5.A3_hVH5VL1-hIgG1 (LALAPGv2), 20H5.A3_hVH5VL1-hIgG1 (REM), 20H5.A3_hVH6VL1-hIgG1 (KEMv2), 20H5.A3_hVH6VL1-hIgG1 (LALAPGv2), 20H5.A3_hVH6VL1-hIgG1 (REM), 21H6-H0L0, 21H6-H1L1, 21H6-H1L2, 21H6-H1L3, 21H6-H1L4, 21H6-H2L1, 21H6-H2L2, 21H6-H2L3, 21H6-H2L4, 21H6-H3L1, 21H6-H3L2, 21H6-H3L3, 21H6-H3L4, 21H6-H4L1, 21H6-H4L2, 21H6-H4L3, 21H6-H4L4, 21H6-H5L1, 21H6-H5L2, 21H6-H5L3, 21H6-H5L4, 21H6-H6L1, 21H6-H6L2, 21H6-H6L3, 21H6-H6L4, 20H5.A3-VH6VL3, or binding fragment thereof.

[0162] In some embodiments, antibodies or binding fragments thereof are provided. In some embodiments, the antibodies or binding fragments thereof are anti-Gal3 antibodies or binding fragments thereof. In some embodiments, the anti-Gal3 antibodies or binding fragments thereof comprises a heavy chain variable region comprising a V_{H}-CDR1, a V_{H}-CDR2, and a V_{H}-CDR3. In some embodiments, the anti-Gal3 antibodies or binding fragments thereof comprise a light chain variable region comprising a V_{L}-CDR1, a V_{L}-CDR2, and a V_{L}-CDR3. In some embodiments, the V_{H}-CDR1 comprises an amino acid sequence having at least 60%, 61%, 62%, 63%, 64%, 65%, 66%, 67%, 68%, 69%, 70%, 71%, 72%, 73%, 74%, 75%, 76%, 77%, 78%, 79%, 80%, 81%, 82%, 83%, 84%, 85%, 86%, 87%, 88%, 89%, 90%, 91%, 92%, 93%, 94%, 95%, 96%, 97%, 98%, 99%, or 100% sequence identity to SEQ ID NO: 32. In some embodiments, the V_{H}-CDR2 comprises an amino acid sequence having at least 60%, 61%, 62%, 63%, 64%, 65%, 66%, 67%, 68%, 69%, 70%, 71%, 72%, 73%, 74%, 75%, 76%, 77%, 78%, 79%, 80%, 81%, 82%, 83%, 84%, 85%, 86%, 87%, 88%, 89%, 90%, 91%, 92%, 93%, 94%, 95%, 96%, 97%, 98%, 99%, or 100% sequence identity to SEQ ID NO: 801, 951, 952. In some embodiments, the V_{H}-CDR3 comprises an amino acid sequence having at least 60%, 61%, 62%, 63%, 64%, 65%, 66%, 67%, 68%, 69%, 70%, 71%, 72%, 73%, 74%, 75%, 76%, 77%, 78%, 79%, 80%, 81%, 82%, 83%, 84%, 85%, 86%, 87%, 88%, 89%, 90%, 91%, 92%, 93%, 94%, 95%, 96%, 97%, 98%, 99%, or 100% sequence identity to SEQ ID NO: 802, 953, 954. In some embodiments, the V_{L}-CDR1 comprises an amino acid sequence having at least 60%, 61%, 62%, 63%, 64%, 65%, 66%, 67%, 68%, 69%, 70%, 71%, 72%, 73%, 74%, 75%, 76%, 77%, 78%, 79%, 80%, 81%, 82%, 83%, 84%, 85%, 86%, 87%, 88%, 89%, 90%, 91%, 92%, 93%, 94%, 95%, 96%, 97%, 98%, 99%, or 100% sequence identity to SEQ ID NO: 171. In some embodiments, the V_{L}-CDR2 comprises an amino acid sequence having at least 60%, 61%, 62%, 63%, 64%, 65%, 66%, 67%, 68%, 69%, 70%, 71%, 72%, 73%, 74%, 75%, 76%, 77%, 78%, 79%, 80%, 81%, 82%, 83%, 84%, 85%, 86%, 87%, 88%, 89%, 90%, 91%, 92%, 93%, 94%, 95%, 96%, 97%, 98%, 99%, or 100% sequence identity to SEQ ID NO: 222. In some embodiments, the V_{L}-CDR3 comprises an amino acid sequence having at least 60%, 61%, 62%, 63%, 64%, 65%, 66%, 67%, 68%, 69%, 70%, 71%, 72%, 73%, 74%, 75%, 76%, 77%, 78%, 79%, 80%, 81%, 82%, 83%, 84%, 85%, 86%, 87%, 88%, 89%, 90%, 91%, 92%, 93%, 94%, 95%, 96%, 97%, 98%, 99%, or 100% sequence identity to SEQ ID NO: 257.

[0163] In some embodiments, antibodies or binding fragments thereof are provided. In some embodiments, the antibodies or binding fragments thereof are anti-Gal3 antibodies or binding fragments thereof. In some embodiments, the anti-Gal3 antibodies or binding fragments thereof comprises a heavy chain variable region comprising a V_{H}-CDR1, a V_{H}-CDR2, and a V_{H}-CDR3. In some embodiments, the anti-Gal3 antibodies or binding fragments thereof comprise a light chain variable region comprising a V_{L}-CDR1, a V_{L}-CDR2, and a V_{L}-CDR3. In some embodiments, the V_{H}-CDR1 comprises an amino acid sequence having at least 60%, 61%, 62%, 63%, 64%, 65%, 66%, 67%, 68%, 69%, 70%, 71%, 72%, 73%, 74%, 75%, 76%, 77%, 78%, 79%, 80%, 81%, 82%, 83%, 84%, 85%, 86%, 87%, 88%, 89%, 90%, 91%, 92%, 93%, 94%, 95%, 96%, 97%, 98%, 99%, or 100% sequence similarity to SEQ ID NO: 32. In some embodiments, the V_{H}-CDR2 comprises an amino acid sequence having at least 60%, 61%, 62%, 63%, 64%, 65%, 66%, 67%, 68%, 69%, 70%, 71%, 72%, 73%, 74%, 75%, 76%, 77%, 78%, 79%, 80%, 81%, 82%, 83%, 84%, 85%, 86%, 87%, 88%, 89%, 90%, 91%, 92%, 93%, 94%, 95%, 96%, 97%, 98%, 99%, or 100% sequence similarity to SEQ ID NO: 801, 951, 952. In some embodiments, the V_{H}-CDR3 comprises an amino acid sequence having at least 60%, 61%, 62%, 63%, 64%, 65%, 66%, 67%, 68%, 69%, 70%, 71%, 72%, 73%, 74%, 75%, 76%, 77%, 78%, 79%, 80%, 81%, 82%, 83%, 84%, 85%, 86%, 87%, 88%, 89%, 90%, 91%, 92%, 93%, 94%, 95%, 96%, 97%, 98%, 99%, or 100% sequence similarity to SEQ ID NO: 802, 953, 954. In some embodiments, the V_{L}-CDR1 comprises an amino acid sequence having at least 60%, 61%, 62%, 63%, 64%, 65%, 66%, 67%, 68%, 69%, 70%, 71%, 72%, 73%, 74%, 75%, 76%, 77%, 78%, 79%, 80%, 81%, 82%, 83%, 84%, 85%, 86%, 87%, 88%, 89%, 90%, 91%, 92%, 93%, 94%, 95%, 96%, 97%, 98%, 99%, or 100% sequence similarity to SEQ ID NO: 171. In some embodiments, the V_{L}-CDR2 comprises an amino acid sequence having at least 60%, 61%, 62%, 63%, 64%, 65%, 66%, 67%, 68%, 69%, 70%, 71%, 72%, 73%, 74%, 75%, 76%, 77%, 78%, 79%, 80%, 81%, 82%, 83%, 84%, 85%, 86%, 87%, 88%, 89%, 90%, 91%, 92%, 93%, 94%, 95%, 96%, 97%, 98%, 99%, or 100% sequence similarity to SEQ ID NO: 222. In some embodiments, the V_{L}-CDR3 comprises an amino acid sequence having at least 60%, 61%, 62%, 63%, 64%, 65%, 66%, 67%, 68%, 69%, 70%, 71%, 72%, 73%, 74%, 75%, 76%, 77%, 78%, 79%, 80%, 81%, 82%, 83%, 84%, 85%, 86%, 87%, 88%, 89%, 90%, 91%, 92%, 93%, 94%, 95%, 96%, 97%, 98%, 99%, or 100% sequence similarity to SEQ ID NO: 257.

[0164] In some embodiments, antibodies or binding fragments thereof are provided. In some embodiments, the antibodies or binding fragments thereof are anti-Gal3 antibodies or binding fragments thereof. In some embodiments, the anti-Gal3 antibodies or binding fragments thereof comprises a heavy chain variable region comprising a V_{H}-CDR1, a V_{H}-CDR2, and a V_{H}-CDR3. In some embodiments, the anti-Gal3 antibodies or binding fragments thereof comprise a light chain variable region comprising a V_{L}-CDR1, a V_{L}-CDR2, and a V_{L}-CDR3. In some embodiments, the V_{H}-CDR1 comprises an amino acid sequence having at least 0, 1, 2, 3, 4, 5, or 6 substitutions relative to SEQ ID NO: 32. In some embodiments, the V_{H}-CDR2 comprises an amino acid sequence having at least 0, 1, 2, 3, 4, 5, or 6 substitutions relative to SEQ ID NO: 801, 951, 952. In some embodiments, the V_{H}-CDR3 comprises an amino acid sequence having at least 0, 1, 2, 3, 4, 5, or 6 substitutions relative to SEQ ID NO: 802, 953, 954. In some embodiments, the V_{L}-CDR1 comprises an amino acid sequence having at least 0, 1, 2, 3, 4, 5, or 6 substitutions relative to SEQ ID NO: 171. In some embodiments, the V_{L}-CDR2 comprises an amino acid sequence having at least 0, 1, 2, 3, 4, 5, or 6 substitutions relative to SEQ ID NO: 222. In some embodiments, the V_{L}-CDR3 comprises an amino acid sequence having at least 0, 1, 2, 3, 4, 5, or 6 substitutions relative to SEQ ID NO: 257.

[0165] In some embodiments, the heavy chain variable region of the anti-Gal3 antibody or binding fragment thereof comprises a sequence having at least 80%, 81%, 82%, 83%, 84%, 85%, 86%, 87%, 88%, 89%, 90%, 91%, 92%, 93%, 94%, 95%, 96%, 97%, 98%, 99%, or 100% identity to any one of the sequences of SEQ ID NOs: 806-813, 955-968. In some embodiments, the light chain variable region of the anti-Gal3 antibody or binding fragment thereof comprises a sequence having at least 80%, 81%, 82%, 83%, 84%, 85%, 86%, 87%, 88%, 89%, 90%, 91%, 92%, 93%, 94%, 95%, 96%, 97%, 98%, 99%, or 100% identity to any one of the sequences of SEQ ID NOs: 821-828, 969-982.

[0166] In some embodiments, the heavy chain variable region of the anti-Gal3 antibody or binding fragment thereof comprises a sequence having at least 80%, 81%, 82%, 83%, 84%, 85%, 86%, 87%, 88%, 89%, 90%, 91%, 92%, 93%, 94%, 95%, 96%, 97%, 98%, 99%, or 100% similarity to any one of the sequences of SEQ ID NOs: 806-813, 955-968. In some embodiments, the light chain variable region of the anti-Gal3 antibody or binding fragment thereof comprises a sequence having at least 80%, 81%, 82%, 83%, 84%, 85%, 86%, 87%, 88%, 89%, 90%, 91%, 92%, 93%, 94%, 95%, 96%, 97%, 98%, 99%, or 100% similarity to any one of the sequences of SEQ ID NOs: 821-828, 969-982.

[0167] In some embodiments, the anti-Gal3 antibody or binding fragment thereof comprises a heavy chain, wherein the heavy chain comprises a sequence having at least 80%, 81%, 82%, 83%, 84%, 85%, 86%, 87%, 88%, 89%, 90%, 91%, 92%, 93%, 94%, 95%, 96%, 97%, 98%, 99%, or 100% identity to any one of the sequences of SEQ ID NOs: 836-843, 983-996. In some embodiments, the anti-Gal3 antibody or binding fragment thereof comprises a light chain, wherein the light chain comprises a sequence having at least 80%, 81%, 82%, 83%, 84%, 85%, 86%, 87%, 88%, 89%, 90%, 91%, 92%, 93%, 94%, 95%, 96%, 97%, 98%, 99%, or 100% identity to any one of the sequences of SEQ ID NOs: 851-858, 997-1010.

[0168] In some embodiments, the anti-Gal3 antibody or binding fragment thereof comprises a heavy chain, wherein the heavy chain comprises a sequence having at least 80%, 81%, 82%, 83%, 84%, 85%, 86%, 87%, 88%, 89%, 90%, 91%, 92%, 93%, 94%, 95%, 96%, 97%, 98%, 99%, or 100% similarity to any one of the sequences of SEQ ID NOs: 836-843, 983-996. In some embodiments, the anti-Gal3 antibody or binding fragment thereof comprises a light chain, wherein the light chain comprises a sequence having at least 80%, 81%, 82%, 83%, 84%, 85%, 86%, 87%, 88%, 89%, 90%, 91%, 92%, 93%, 94%, 95%, 96%, 97%, 98%, 99%, or 100% similarity to any one of the sequences of SEQ ID NOs: 851-858, 997-1010.

[0169] In some embodiments, antibodies or binding fragments thereof are provided. In some embodiments, the antibodies or binding fragments thereof are anti-Gal3 antibodies or binding fragments thereof. In some embodiments, the anti-Gal3 antibodies or binding fragments thereof comprises a heavy chain variable region comprising a V_{H}-CDR1, a V_{H}-CDR2, and a V_{H}-CDR3. In some embodiments, the anti-Gal3 antibodies or binding fragments thereof comprise a light chain variable region comprising a V_{L}-CDR1, a V_{L}-CDR2, and a VL-CDR3. In some embodiments, the V_{H}-CDR1 comprises an amino acid sequence having at least 60%, 61%, 62%, 63%, 64%, 65%, 66%, 67%, 68%, 69%, 70%, 71%, 72%, 73%, 74%, 75%, 76%, 77%, 78%, 79%, 80%, 81%, 82%, 83%, 84%, 85%, 86%, 87%, 88%, 89%, 90%, 91%, 92%, 93%, 94%, 95%, 96%, 97%, 98%, 99%, or 100% sequence identity to SEQ ID NO: 37. In some embodiments, the V_{H}-CDR2 comprises an amino acid sequence having at least 60%, 61%, 62%, 63%, 64%, 65%, 66%, 67%, 68%, 69%, 70%, 71%, 72%, 73%, 74%, 75%, 76%, 77%, 78%, 79%, 80%, 81%, 82%, 83%, 84%, 85%, 86%, 87%, 88%, 89%, 90%, 91%, 92%, 93%, 94%, 95%, 96%, 97%, 98%, 99%, or 100% sequence identity to SEQ ID NO: 77. In some embodiments, the V_{H}-CDR3 comprises an amino acid sequence having at least 60%, 61%, 62%, 63%, 64%, 65%, 66%, 67%, 68%, 69%, 70%, 71%, 72%, 73%, 74%, 75%, 76%, 77%, 78%, 79%, 80%, 81%, 82%, 83%, 84%, 85%, 86%, 87%, 88%, 89%, 90%, 91%, 92%, 93%, 94%, 95%, 96%, 97%, 98%, 99%, or 100% sequence identity to SEQ ID NO: 118. In some embodiments, the V_{L}-CDR1 comprises an amino acid sequence having at least 60%, 61%, 62%, 63%, 64%, 65%, 66%, 67%, 68%, 69%, 70%, 71%, 72%, 73%, 74%, 75%, 76%, 77%, 78%, 79%, 80%, 81%, 82%, 83%, 84%, 85%, 86%, 87%, 88%, 89%, 90%, 91%, 92%, 93%, 94%, 95%, 96%, 97%, 98%, 99%, or 100% sequence identity to SEQ ID NO: 178. In some embodiments, the V_{L}-CDR2 comprises an amino acid sequence having at least 60%, 61%, 62%, 63%, 64%, 65%, 66%, 67%, 68%, 69%, 70%, 71%, 72%, 73%, 74%, 75%, 76%, 77%, 78%, 79%, 80%, 81%, 82%, 83%, 84%, 85%, 86%, 87%, 88%, 89%, 90%, 91%, 92%, 93%, 94%, 95%, 96%, 97%, 98%, 99%, or 100% sequence identity to SEQ ID NO: 229. In some embodiments, the V_{L}-CDR3 comprises an amino acid sequence having at least 60%, 61%, 62%, 63%, 64%, 65%, 66%, 67%, 68%, 69%, 70%, 71%, 72%, 73%, 74%, 75%, 76%, 77%, 78%, 79%, 80%, 81%, 82%, 83%, 84%, 85%, 86%, 87%, 88%, 89%, 90%, 91%, 92%, 93%, 94%, 95%, 96%, 97%, 98%, 99%, or 100% sequence identity to SEQ ID NO: 256.

[0170] In some embodiments, antibodies or binding fragments thereof are provided. In some embodiments, the antibodies or binding fragments thereof are anti-Gal3 antibodies or binding fragments thereof. In some embodiments, the anti-Gal3 antibodies or binding fragments thereof comprises a heavy chain variable region comprising a V_{H}-CDR1, a V_{H}-CDR2, and a V_{H}-CDR3. In some embodiments, the anti-Gal3 antibodies or binding fragments thereof comprise a light chain variable region comprising a V_{L}-CDR1, a V_{L}-CDR2, and a V_{L}-CDR3. In some embodiments, the V_{H}-CDR1 comprises an amino acid sequence having at least 60%, 61%, 62%, 63%, 64%, 65%, 66%, 67%, 68%, 69%, 70%, 71%, 72%, 73%, 74%, 75%, 76%, 77%, 78%, 79%, 80%, 81%, 82%, 83%, 84%, 85%, 86%, 87%, 88%, 89%, 90%, 91%, 92%, 93%, 94%, 95%, 96%, 97%, 98%, 99%, or 100% sequence similarity to SEQ ID NO: 37. In some embodiments, the V_{H}-CDR2 comprises an amino acid sequence having at least 60%, 61%, 62%, 63%, 64%, 65%, 66%, 67%, 68%, 69%, 70%, 71%, 72%, 73%, 74%, 75%, 76%, 77%, 78%, 79%, 80%, 81%, 82%, 83%, 84%, 85%, 86%, 87%, 88%, 89%, 90%, 91%, 92%, 93%, 94%, 95%, 96%, 97%, 98%, 99%, or 100% sequence similarity to SEQ ID NO: 77. In some embodiments, the V_{H}-CDR3 comprises an amino acid sequence having at least 60%, 61%, 62%, 63%, 64%, 65%, 66%, 67%, 68%, 69%, 70%, 71%, 72%, 73%, 74%, 75%, 76%, 77%, 78%, 79%, 80%, 81%, 82%, 83%, 84%, 85%, 86%, 87%, 88%, 89%, 90%, 91%, 92%, 93%, 94%, 95%, 96%, 97%, 98%, 99%, or 100% sequence similarity to SEQ ID NO: 118. In some embodiments, the V_{L}-CDR1 comprises an amino acid sequence having at least 60%, 61%, 62%, 63%, 64%, 65%, 66%, 67%, 68%, 69%, 70%, 71%, 72%, 73%, 74%, 75%, 76%, 77%, 78%, 79%, 80%, 81%, 82%, 83%, 84%, 85%, 86%, 87%, 88%, 89%, 90%, 91%, 92%, 93%, 94%, 95%, 96%, 97%, 98%, 99%, or 100% sequence similarity to SEQ ID NO: 178. In some embodiments, the V_{L}-CDR2 comprises an amino acid sequence having at least 60%, 61%, 62%, 63%, 64%, 65%, 66%, 67%, 68%, 69%, 70%, 71%, 72%, 73%, 74%, 75%, 76%, 77%, 78%, 79%, 80%, 81%, 82%, 83%, 84%, 85%, 86%, 87%, 88%, 89%, 90%, 91%, 92%, 93%, 94%, 95%, 96%, 97%, 98%, 99%, or 100% sequence similarity to SEQ ID NO: 229. In some embodiments, the V_{L}-CDR3 comprises an amino acid sequence having at least 60%, 61%, 62%, 63%, 64%, 65%, 66%, 67%, 68%, 69%, 70%, 71%, 72%, 73%, 74%, 75%, 76%, 77%, 78%, 79%, 80%, 81%, 82%, 83%, 84%, 85%, 86%, 87%, 88%, 89%, 90%, 91%, 92%, 93%, 94%, 95%, 96%, 97%, 98%, 99%, or 100% sequence similarity to SEQ ID NO: 256.

[0171] In some embodiments, antibodies or binding fragments thereof are provided. In some embodiments, the antibodies or binding fragments thereof are anti-Gal3 antibodies or binding fragments thereof. In some embodiments, the anti-Gal3 antibodies or binding fragments thereof comprises a heavy chain variable region comprising a V_{H}-CDR1, a V_{H}-CDR2, and a V_{H}-CDR3. In some embodiments, the anti-Gal3 antibodies or binding fragments thereof comprise a light chain variable region comprising a V_{L}-CDR1, a V_{L}-CDR2, and a V_{L}-CDR3. In some embodiments, the V_{H}-CDR1 comprises an amino acid sequence having at least 0, 1, 2, 3, 4, 5, or 6 substitutions relative to SEQ ID NO: 37. In some embodiments, the V_{H}-CDR2 comprises an amino acid sequence having at least 0, 1, 2, 3, 4, 5, or 6 substitutions relative to SEQ ID NO: 77. In some embodiments, the V_{H}-CDR3 comprises an amino acid sequence having at least 0, 1, 2, 3, 4, 5, or 6 substitutions relative to SEQ ID NO: 118. In some embodiments, the V_{L}-CDR1 comprises an amino acid sequence having at least 0, 1, 2, 3, 4, 5, or 6 substitutions relative to SEQ ID NO: 178. In some embodiments, the V_{L}-CDR2 comprises an amino acid sequence having at least 0, 1, 2, 3, 4, 5, or 6 substitutions relative to SEQ ID NO: 229. In some embodiments, the V_{L}-CDR3 comprises an amino acid sequence having at least 0, 1, 2, 3, 4, 5, or 6 substitutions relative to SEQ ID NO: 256.

[0172] In some embodiments, the heavy chain variable region of the anti-Gal3 antibody or binding fragment thereof comprises a sequence having at least 80%, 81%, 82%, 83%, 84%, 85%, 86%, 87%, 88%, 89%, 90%, 91%, 92%, 93%, 94%, 95%, 96%, 97%, 98%, 99%, or 100% identity to any one of the sequences of SEQ ID NOs: 814-820, 1067-1109. In some embodiments, the light chain variable region of the anti-Gal3 antibody or binding fragment thereof comprises a sequence having at least 80%, 81%, 82%, 83%, 84%, 85%, 86%, 87%, 88%, 89%, 90%, 91%, 92%, 93%, 94%, 95%, 96%, 97%, 98%, 99%, or 100% identity to any one of the sequences of SEQ ID NOs: 829-835, 1110-1152.

[0173] In some embodiments, the heavy chain variable region of the anti-Gal3 antibody or binding fragment thereof comprises a sequence having at least 80%, 81%, 82%, 83%, 84%, 85%, 86%, 87%, 88%, 89%, 90%, 91%, 92%, 93%, 94%, 95%, 96%, 97%, 98%, 99%, or 100% similarity to any one of the sequences of SEQ ID NOs: 814-820, 1067-1109. In some embodiments, the light chain variable region of the anti-Gal3 antibody or binding fragment thereof comprises a sequence having at least 80%, 81%, 82%, 83%, 84%, 85%, 86%, 87%, 88%, 89%, 90%, 91%, 92%, 93%, 94%, 95%, 96%, 97%, 98%, 99%, or 100% similarity to any one of the sequences of SEQ ID NOs: 829-835, 1110-1152.

[0174] In some embodiments, the anti-Gal3 antibody or binding fragment thereof comprises a heavy chain, wherein the heavy chain comprises a sequence having at least 80%, 81%, 82%, 83%, 84%, 85%, 86%, 87%, 88%, 89%, 90%, 91%, 92%, 93%, 94%, 95%, 96%, 97%, 98%, 99%, or 100% identity to any one of the sequences of SEQ ID NOs: 844-850, 1153-1195. In some embodiments, the anti-Gal3 antibody or binding fragment thereof comprises a light chain, wherein the light chain comprises a sequence having at least 80%, 81%, 82%, 83%, 84%, 85%, 86%, 87%, 88%, 89%, 90%, 91%, 92%, 93%, 94%, 95%, 96%, 97%, 98%, 99%, or 100% identity to any one of the sequences of SEQ ID NOs: 859-865, 1196-1238.

[0175] In some embodiments, the anti-Gal3 antibody or binding fragment thereof comprises a heavy chain, wherein the heavy chain comprises a sequence having at least 80%, 81%, 82%, 83%, 84%, 85%, 86%, 87%, 88%, 89%, 90%, 91%, 92%, 93%, 94%, 95%, 96%, 97%, 98%, 99%, or 100% similarity to any one of the sequences of SEQ ID NOs: 844-850, 1153-1195. In some embodiments, the anti-Gal3 antibody or binding fragment thereof comprises a light chain, wherein the light chain comprises a sequence having at least 80%, 81%, 82%, 83%, 84%, 85%, 86%, 87%, 88%, 89%, 90%, 91%, 92%, 93%, 94%, 95%, 96%, 97%, 98%, 99%, or 100% similarity to any one of the sequences of SEQ ID NOs: 859-865, 1196-1238.

[0176] In some embodiments, the heavy chain variable region of the anti-Gal3 antibody or binding fragment thereof comprises a sequence having at least 80%, 81%, 82%, 83%, 84%, 85%, 86%, 87%, 88%, 89%, 90%, 91%, 92%, 93%, 94%, 95%, 96%, 97%, 98%, 99%, or 100% identity to any one of the sequences of SEQ ID NOs: 1415-1439. In some embodiments, the light chain variable region of the anti-Gal3 antibody or binding fragment thereof comprises a sequence having at least 80%, 81%, 82%, 83%, 84%, 85%, 86%, 87%, 88%, 89%, 90%, 91%, 92%, 93%, 94%, 95%, 96%, 97%, 98%, 99%, or 100% identity to any one of the sequences of SEQ ID NOs: 1440-1464.

[0177] In some embodiments, the heavy chain variable region of the anti-Gal3 antibody or binding fragment thereof comprises a sequence having at least 80%, 81%, 82%, 83%, 84%, 85%, 86%, 87%, 88%, 89%, 90%, 91%, 92%, 93%, 94%, 95%, 96%, 97%, 98%, 99%, or 100% similarity to any one of the sequences of SEQ ID NOs: 1415-1439. In some embodiments, the light chain variable region of the anti-Gal3 antibody or binding fragment thereof comprises a sequence having at least 80%, 81%, 82%, 83%, 84%, 85%, 86%, 87%, 88%, 89%, 90%, 91%, 92%, 93%, 94%, 95%, 96%, 97%, 98%, 99%, or 100% similarity to any one of the sequences of SEQ ID NOs: 1440-1464.

[0178] In some embodiments, the anti-Gal3 antibody or binding fragment thereof comprises a heavy chain, wherein the heavy chain comprises a sequence having at least 80%, 81%, 82%, 83%, 84%, 85%, 86%, 87%, 88%, 89%, 90%, 91%, 92%, 93%, 94%, 95%, 96%, 97%, 98%, 99%, or 100% identity to any one of the sequences of SEQ ID NOs: 1465-1489. In some embodiments, the anti-Gal3 antibody or binding fragment thereof comprises a light chain, wherein the light chain comprises a sequence having at least 80%, 81%, 82%, 83%, 84%, 85%, 86%, 87%, 88%, 89%, 90%, 91%, 92%, 93%, 94%, 95%, 96%, 97%, 98%, 99%, or 100% identity to any one of the sequences of SEQ ID NOs: 1490-1514.

[0179] In some embodiments, the anti-Gal3 antibody or binding fragment thereof comprises a heavy chain, wherein the heavy chain comprises a sequence having at least 80%, 81%, 82%, 83%, 84%, 85%, 86%, 87%, 88%, 89%, 90%, 91%, 92%, 93%, 94%, 95%, 96%, 97%, 98%, 99%, or 100% similarity to any one of the sequences of SEQ ID NOs: 1465-1489. In some embodiments, the anti-Gal3 antibody or binding fragment thereof comprises a light chain, wherein the light chain comprises a sequence having at least 80%, 81%, 82%, 83%, 84%, 85%, 86%, 87%, 88%, 89%, 90%, 91%, 92%, 93%, 94%, 95%, 96%, 97%, 98%, 99%, or 100% similarity to any one of the sequences of SEQ ID NOs: 1490-1514.

[0180] In some embodiments, the anti-Gal3 antibody or binding fragment thereof excludes the subset of named anti-Gal3 antibodies or binding fragments thereof depicted in any one of FIGS. 38A-D. In some embodiments, CDRs (including heavy chain and light chain CDRs), heavy chain variable regions, light chain variable regions, heavy chains, and/or light chains are excluded from the sequences associated with the subset of named anti-Gal3 antibodies or binding fragments thereof depicted in any one of FIGS. 38A-D. In some embodiments, combinations of CDRs (including heavy chain and light chain CDRs), heavy chain variable regions, light chain variable regions, heavy chains, and/or light chains are excluded from the sequences associated with the subset of named anti-Gal3 antibodies or binding fragments thereof depicted in any one of FIGS. 38A-D. In some embodiments, the anti-Gal3 antibody or binding fragment thereof excludes those selected from the group of named anti-Gal3 antibody or binding fragment thereof depicted in FIG. 38A, or excludes any one or more of the CDRs, VH, VL, HC, and/or LC thereof. In some embodiments, the anti-Gal3 antibody or binding fragment thereof excludes those selected from the group of named anti-Gal3 antibody or binding fragment thereof depicted in FIG. 38B, or excludes any one or more of the CDRs, VH, VL, HC, and/or LC thereof. In some embodiments, the anti-Gal3 antibody or binding fragment thereof excludes those selected from the group of named anti-Gal3 antibody or binding fragment thereof depicted in FIG. 38C, or excludes any one or more of the CDRs, VH, VL, HC, and/or LC thereof. In some embodiments, the anti-Gal3 antibody or binding fragment thereof excludes those selected from the group of named anti-Gal3 antibody or binding fragment thereof depicted in FIG. 38D, or excludes any one or more of the CDRs, VH, VL, HC, and/or LC thereof. In some embodiments, the anti-Gal3 antibody or binding fragment thereof blocks the interaction between Gal3 and GLUT (e.g., GLUT1 and/or GLUT4) and excludes those selected from the group of named anti-Gal3 antibody or binding fragment thereof depicted in FIG. 38A, or excludes any one or more of the CDRs, VH, VL, HC, and/or LC thereof. In some embodiments, the anti-Gal3 antibody or binding fragment thereof blocks the interaction between Gal3 and GLUT (e.g., GLUT1 and/or GLUT4) and excludes those selected from the group of named anti-Gal3 antibody or binding fragment thereof depicted in FIG. 38B, or excludes any one or more of the CDRs, VH, VL, HC, and/or LC thereof. In some embodiments, the anti-Gal3 antibody or binding fragment thereof blocks the interaction between Gal3 and GLUT (e.g., GLUT1 and/or GLUT4) and excludes those selected from the group of named anti-Gal3 antibody or binding fragment thereof depicted in FIG. 38C, or excludes any one or more of the CDRs, VH, VL, HC, and/or LC thereof. In some embodiments, the anti-Gal3 antibody or binding fragment thereof blocks the interaction between Gal3 and GLUT (e.g., GLUT1 and/or GLUT4) and excludes those selected from the group of named anti-Gal3 antibody or binding fragment thereof depicted in FIG. 38D, or excludes any one or more of the CDRs, VH, VL, HC, and/or LC thereof. In other embodiments, any of these constructs are used for any of the methods provided herein.

[0181] In some embodiments, the anti-Gal3 antibody or binding fragment thereof is selected from the subset of named anti-Gal3 antibodies or binding fragments thereof depicted in any one of FIGS. 39A-E. In some embodiments, CDRs (including heavy chain and light chain CDRs), heavy chain variable regions, light chain variable regions, heavy chains, and/or light chains are selected from the sequences associated with the subset of named anti-Gal3 antibodies or binding fragments thereof depicted in any one of FIGS. 39A-E. In some embodiments, combinations of CDRs (including heavy chain and light chain CDRs), heavy chain variable regions, light chain variable regions, heavy chains, and/or light chains are selected from the sequences associated with the subset of named anti-Gal3 antibodies or binding fragments thereof depicted in any one of FIGS. 39A-E. In some embodiments, the anti-Gal3 antibody or binding fragment thereof is selected from the group of named anti-Gal3 antibody or binding fragment thereof depicted in FIG. 39A, or comprises any one or more of the CDRs, VH, VL, HC, and/or LC thereof. In some embodiments, the anti-Gal3 antibody or binding fragment thereof is selected from the group of named anti-Gal3 antibody or binding fragment thereof depicted in FIG. 39B, or comprises any one or more of the CDRs, VH, VL, HC, and/or LC thereof. In some embodiments, the anti-Gal3 antibody or binding fragment thereof is selected from the group of named anti-Gal3 antibody or binding fragment thereof depicted in FIG. 39C, or comprises any one or more of the CDRs, VH, VL, HC, and/or LC thereof. In some embodiments, the anti-Gal3 antibody or binding fragment thereof is selected from the group of named anti-Gal3 antibody or binding fragment thereof depicted in FIG. 39D, or comprises any one or more of the CDRs, VH, VL, HC, and/or LC thereof. In some embodiments, the anti-Gal3 antibody or binding fragment thereof is selected from the group of named anti-Gal3 antibody or binding fragment thereof depicted in FIG. 39E, or comprises any one or more of the CDRs, VH, VL, HC, and/or LC thereof.

[0182] In some embodiments, the anti-Gal3 antibody or binding fragment thereof binds to specific epitopes within a Gal3 protein. In some embodiments, the anti-Gal3 antibody or binding fragment thereof binds to a specific epitope within a Gal3 protein having an amino acid sequence according to SEQ ID NO: 1-2, provided in FIG. 17.

[0183] In some embodiments, the anti-Gal3 antibody or binding fragment thereof may bind to at least 1, 2, 3, 4, 5, 6, 7, 8, 9, 10, 11, 12, 13, 14, 15, 16, 17, 18, 19, or 20 amino acid residues within a peptide illustrated in FIG. 18 (SEQ ID NOs: 3-26).

[0184] In some embodiments, the anti-Gal3 antibody or binding fragment thereof may bind to at least 1, 2, 3, 4, 5, 6, 7, 8, 9, 10, 11, 12, 13, 14, 15, 16, 17, 18, 19, or 20 amino acid residues within amino acid residues 1-20 of SEQ ID NO: 1-2. In some embodiments, the anti-Gal3 antibody or binding fragment thereof may bind to at least 1, 2, 3, 4, 5, 6, 7, 8, 9, 10, 11, 12, 13, 14, 15, 16, 17, 18, 19, or 20 amino acid residues within amino acid residues 31-50 of SEQ ID NO: 1-2. In some embodiments, the anti-Gal3 antibody or binding fragment thereof may bind to at least 1, 2, 3, 4, 5, 6, 7, 8, 9, 10, 11, 12, 13, 14, 15, 16, 17, 18, 19, or 20 amino acid residues within amino acid residues 51-70 of SEQ ID NO: 1-2. In some embodiments, the anti-Gal3 antibody or binding fragment thereof may bind to at least 1, 2, 3, 4, 5, 6, 7, 8, 9, 10, 11, 12, 13, 14, 15, 16, 17, 18, 19, or 20 amino acid residues within amino acid residues 61-80 of SEQ ID NO: 1-2.

[0185] In some embodiments, the anti-Gal3 antibody or binding fragment thereof may bind to at least 1, 2, 3, 4, 5, 6, 7, 8, 9, 10, 11, 12, 13, 14, 15, 16, 17, 18, 19, or 20 amino acid residues within Peptide 1 (SEQ ID NO: 3), Peptide 4 (SEQ ID NO: 6), Peptide 6 (SEQ ID NO: 8), or Peptide 7 (SEQ ID NO: 9). In some embodiments, the anti-Gal3 antibody or binding fragment thereof may bind to at least 1, 2, 3, 4, 5, 6, 7, 8, 9, 10, 11, 12, 13, 14, 15, 16, 17, 18, 19, or 20 amino acid residues within Peptide 1 (SEQ ID NO: 3). In some embodiments, the anti-Gal3 antibody or binding fragment thereof may bind to at least 11, 2, 3, 4, 5, 6, 7, 8, 9, 10, 11, 12, 13, 14, 15, 16, 17, 18, 19, or 20 amino acid residues within Peptide 4 (SEQ ID NO: 6). In some embodiments, the anti-Gal3 antibody or binding fragment thereof may bind to at least 1, 2, 3, 4, 5, 6, 7, 8, 9, 10, 11, 12, 13, 14, 15, 16, 17, 18, 19, or 20 amino acid residues within Peptide 6 (SEQ ID NO: 8). In some embodiments, the anti-Gal3 antibody or binding fragment thereof may bind to at least 1, 2, 3, 4, 5, 6, 7, 8, 9, 10, 11, 12, 13, 14, 15, 16, 17, 18, 19, or 20 amino acid residues within Peptide 7 (SEQ ID NO: 9). In some embodiments, the anti-Gal3 antibody or binding fragment thereof binds to an epitope present within a region of Gal3 defined by Peptide 1 (SEQ ID NO: 3). In some embodiments, the anti-Gal3 antibody or binding fragment thereof binds to an epitope present within a region of Gal3 defined by Peptide 4 (SEQ ID NO: 6). In some embodiments, the anti-Gal3 antibody or binding fragment thereof binds to an epitope present within a region of Gal3 defined by Peptide 6 (SEQ ID NO: 8). In some embodiments, the anti-Gal3 antibody or binding fragment thereof binds to an epitope present within a region of Gal3 defined by Peptide 7 (SEQ ID NO: 9). In some embodiments, the antibody is one that binds to 1, 2, or all 3 of peptides 1, 6, and/or 7.

[0186] In some embodiments, an anti-Gal3 antibody or binding fragment thereof as described herein may bind to the N-terminal domain of Gal3 or a portion thereof. In some embodiments, an anti-Gal3 antibody or binding fragment thereof as described herein may bind to an epitope of Gal3 that includes a motif of GxYPG, where x is the amino acids alanine (A), glycine (G), or valine (V). In some embodiments, an anti-Gal3 antibody or binding fragment thereof as described herein may bind to an epitope of Gal3 that includes two GxYPG motifs separated by three amino acids, where x is A, G, or V.

[0187] In some embodiments, the anti-Gal3 antibody or binding fragment thereof binds to Gal3. In some embodiments, the anti-Gal3 antibody or binding fragment thereof binds to the N-terminus of Gal3, the N-terminal domain of Gal3, or the TRD of Gal3. In some embodiments, the anti-Gal3 antibody or binding fragment thereof does not bind to the N-terminus of Gal3, the N-terminal domain of Gal3, or the TRD of Gal3. In some embodiments, the anti-Gal3 antibody or binding fragment thereof binds to the C-terminus of Gal3, the C-terminal domain of Gal3, or the CRD of Gal3. In some embodiments, the anti-Gal3 antibody or binding fragment thereof does not bind to the C-terminus of Gal3, the C-terminal domain of Gal3, or the CRD of Gal3. In some embodiments, the anti-Gal3 antibody or binding fragment thereof binds to Gal3 isoform 1. In some embodiments, the anti-Gal3 antibody or binding fragment thereof binds to the N-terminus of Gal3 isoform 1, the N-terminal domain of Gal3 isoform 1, amino acids 1-111 of Gal3 isoform 1, the TRD of Gal3 isoform 1, or amino acids 36-109 of Gal3 isoform 1. In some embodiments, the anti-Gal3 antibody or binding fragment thereof does not bind to the N-terminus of Gal3 isoform 1, the N-terminal domain of Gal3 isoform 1, amino acids 1-111 of Gal3, the TRD of Gal3 isoform 1, or amino acids 36-109 of Gal3 isoform 1. In some embodiments, the anti-Gal3 antibody or binding fragment thereof binds to the C-terminus of Gal3 isoform 1, the C-terminal domain of Gal3 isoform 1, amino acids 112-250 of Gal3, or the CRD of Gal3. In some embodiments, the anti-Gal3 antibody or binding fragment thereof does not bind to the C-terminus of Gal3 isoform 1, the C-terminal domain of Gal3 isoform 1, amino acids 112-250 of Gal3 isoform 1, or the CRD of Gal3. In some embodiments, the anti-Gal3 antibody or binding fragment thereof binds to the N-terminus of Gal3 isoform 3, the N-terminal domain of Gal3 isoform 3, amino acids 1-125 of Gal3, the TRD of Gal3 isoform 3, or amino acids 50-123 of Gal3 isoform 3. In some embodiments, the anti-Gal3 antibody or binding fragment thereof does not bind to the N-terminus of Gal3 isoform 3, the N-terminal domain of Gal3 isoform 3, amino acids 1-125 of Gal3 isoform 3, the TRD of Gal3, or amino acids 50-123 of Gal3 isoform 3. In some embodiments, the anti-Gal3 antibody or binding fragment thereof binds to the C-terminus of Gal3 isoform 3, the C-terminal domain of Gal3 isoform 3, amino acids 126-264 of Gal3 isoform 3, or the CRD of Gal3. In some embodiments, the anti-Gal3 antibody or binding fragment thereof does not bind to the C-terminus of Gal3 isoform 3, the C-terminal domain of Gal3 isoform 3, amino acids 126-264 of Gal3 isoform 3, or the CRD of Gal3 isoform 3.

[0188] In some embodiments, the interaction between Gal3 and a cell surface marker can be reduced to less than 80%, less than 75%, less than 70%, less than 60%, less than 59%, less than 50%, less than 40%, less than 34%, less than 30%, less than 20%, less than 14%, less than 10%, less than 7%, less than 5%, less than 4%, or less than 1%.

[0189] In some embodiments, the anti-Gal3 antibody or binding fragment thereof binds to Gal3 with a dissociation constant (K_{D}) of less than 1 nM, less than 1.2 nM, less than 2 nM, less than 5 nM, less than 10 nM, less than 13.5 nM, less than 15 nM, less than 20 nM, less than 25 nM, or less than 30 nM. In some embodiments, the anti-Gal3 antibody or binding fragment thereof binds to Gal3 with a K_{D} of less than 1 nM. In some embodiments, the anti-Gal3 antibody or binding fragment thereof binds to Gal3 with a K_{D} of less than 1.2 nM. In some embodiments, the anti-Gal3 antibody or binding fragment thereof binds to Gal3 with a K_{D} of less than 2 nM. In some embodiments, the anti-Gal3 antibody or binding fragment thereof binds to Gal3 with a K_{D} of less than 5 nM. In some embodiments, the anti-Gal3 antibody or binding fragment thereof binds to Gal3 with a K_{D} of less than 10 nM. In some embodiments, the anti-Gal3 antibody or binding fragment thereof binds to Gal3 with a K_{D} of less than 13.5 nM. In some embodiments, the anti-Gal3 antibody or binding fragment thereof binds to Gal3 with a K_{D} of less than 15 nM. In some embodiments, the anti-Gal3 antibody or binding fragment thereof binds to Gal3 with a K_{D} of less than 20 nM. In some embodiments, the anti-Gal3 antibody or binding fragment thereof binds to Gal3 with a K_{D} of less than 25 nM. In some embodiments, the anti-Gal3 antibody or binding fragment thereof binds to Gal3 with a K_{D} of less than 30 nM.

[0190] In some embodiments, the anti-Gal3 antibody or binding fragment thereof comprises any one of the variable heavy chain complementarity-determining region 1 (V_{H}-CDR1) sequences illustrated in FIG. 19A (SEQ ID NOs: 27-70). In some embodiments, the anti-Gal3 antibody comprises a V_{H}-CDR1 sequence having at least 60%, at least 65%, at least 70%, at least 75%, at least 80%, at least 85%, at least 86%, at least 87%, at least 88%, at least 89%, at least 90%, at least 91%, at least 92%, at least 93%, at least 94%, at least 95%, at least 96%, at least 97%, at least 98%, or at least 99% sequence identity to any one of SEQ ID NOs: 27-70. In some embodiments, the anti-Gal3 antibody comprises a V_{H}-CDR1 sequence having at least 60%, at least 65%, at least 70%, at least 75%, at least 80%, at least 85%, at least 86%, at least 87%, at least 88%, at least 89%, at least 90%, at least 91%, at least 92%, at least 93%, at least 94%, at least 95%, at least 96%, at least 97%, at least 98%, or at least 99% sequence similarity to any one of SEQ ID NOs: 27-70.

[0191] In some embodiments, the anti-Gal3 antibody or binding fragment thereof comprises any one of the variable heavy chain complementarity-determining region 2 (V_{H}-CDR2) sequences illustrated in FIG. 19B (SEQ ID NOs: 71-111, 801, 951, 952). In some embodiments, the anti-Gal3 antibody or binding fragment thereof comprises a V_{H}-CDR2 sequence having at least 60%, at least 65%, at least 70%, at least 75%, at least 80%, at least 85%, at least 86%, at least 87%, at least 88%, at least 89%, at least 90%, at least 91%, at least 92%, at least 93%, at least 94%, at least 95%, at least 96%, at least 97%, at least 98%, or at least 99% sequence identity to any one of SEQ ID NOs: 71-111, 801, 951, 952. In some embodiments, the anti-Gal3 antibody or binding fragment thereof comprises a V_{H}-CDR2 sequence having at least 60%, at least 65%, at least 70%, at least 75%, at least 80%, at least 85%, at least 86%, at least 87%, at least 88%, at least 89%, at least 90%, at least 91%, at least 92%, at least 93%, at least 94%, at least 95%, at least 96%, at least 97%, at least 98%, or at least 99% sequence similarity to any one of SEQ ID NOs: 71-111, 801, 951, 952.

[0192] In some embodiments, the anti-Gal3 antibody or binding fragment thereof comprises any one of the variable heavy chain complementarity-determining region 3 (V_{H}-CDR3) sequences illustrated in FIG. 19C (SEQ ID NOs: 112-169, 802, 953, 954). In some embodiments, the anti-Gal3 antibody or binding fragment thereof comprises a V_{H}-CDR3 sequence having at least 60%, at least 65%, at least 70%, at least 75%, at least 80%, at least 85%, at least 86%, at least 87%, at least 88%, at least 89%, at least 90%, at least 91%, at least 92%, at least 93%, at least 94%, at least 95%, at least 96%, at least 97%, at least 98%, or at least 99% sequence identity to any one of SEQ ID NOs: 112-169, 802, 953, 954. In some embodiments, the anti-Gal3 antibody or binding fragment thereof comprises a V_{H}-CDR3 sequence having at least 60%, at least 65%, at least 70%, at least 75%, at least 80%, at least 85%, at least 86%, at least 87%, at least 88%, at least 89%, at least 90%, at least 91%, at least 92%, at least 93%, at least 94%, at least 95%, at least 96%, at least 97%, at least 98%, or at least 99% sequence similarity to any one of SEQ ID NOs: 112-169, 802, 953, 954.

[0193] In some embodiments, the anti-Gal3 antibody or binding fragment thereof comprises any one of the variable light chain complementarity-determining region 1 (V_{L}—CDR1) sequences illustrated in FIG. 20A (SEQ ID NOs: 170-220). In some embodiments, the anti-Gal3 antibody or binding fragment thereof comprises a V_{L}-CDR1 sequence having at least 60%, at least 65%, at least 70%, at least 75%, at least 80%, at least 85%, at least 86%, at least 87%, at least 88%, at least 89%, at least 90%, at least 91%, at least 92%, at least 93%, at least 94%, at least 95%, at least 96%, at least 97%, at least 98%, or at least 99% sequence identity to any one of SEQ ID NOs: 170-220. In some embodiments, the anti-Gal3 antibody or binding fragment thereof comprises a V_{L}-CDR1 sequence having at least 60%, at least 65%, at least 70%, at least 75%, at least 80%, at least 85%, at least 86%, at least 87%, at least 88%, at least 89%, at least 90%, at least 91%, at least 92%, at least 93%, at least 94%, at least 95%, at least 96%, at least 97%, at least 98%, or at least 99% sequence similarity to any one of SEQ ID NOs: 170-220.

[0194] In some embodiments, the anti-Gal3 antibody or binding fragment thereof comprises any one of the variable light chain complementarity-determining region 2 (V_{L}—CDR2) sequences illustrated in FIG. 20B (SEQ ID NOs: 221-247). In some embodiments, the anti-Gal3 antibody or binding fragment thereof comprises a V_{L}-CDR2 sequence having at least 60%, at least 65%, at least 70%, at least 75%, at least 80%, at least 85%, at least 86%, at least 87%, at least 88%, at least 89%, at least 90%, at least 91%, at least 92%, at least 93%, at least 94%, at least 95%, at least 96%, at least 97%, at least 98%, or at least 99% sequence identity to any one of SEQ ID NOs: 221-247. In some embodiments, the anti-Gal3 antibody or binding fragment thereof comprises a V_{L}-CDR2 sequence having at least 60%, at least 65%, at least 70%, at least 75%, at least 80%, at least 85%, at least 86%, at least 87%, at least 88%, at least 89%, at least 90%, at least 91%, at least 92%, at least 93%, at least 94%, at least 95%, at least 96%, at least 97%, at least 98%, or at least 99% sequence similarity to any one of SEQ ID NOs: 221-247.

[0195] In some embodiments, the anti-Gal3 antibody or binding fragment thereof comprises any one of the variable light chain complementarity-determining region 3 (VL-CDR3) sequences illustrated in FIG. 20C (SEQ ID NOs: 248-296). In some embodiments, the anti-Gal3 antibody or binding fragment thereof comprises a V_{L}-CDR3 sequence having at least 60%, at least 65%, at least 70%, at least 75%, at least 80%, at least 85%, at least 86%, at least 87%, at least 88%, at least 89%, at least 90%, at least 91%, at least 92%, at least 93%, at least 94%, at least 95%, at least 96%, at least 97%, at least 98%, or at least 99% sequence identity to any one of SEQ ID NOs: 248-296. In some embodiments, the anti-Gal3 antibody or binding fragment thereof comprises a V_{L}-CDR3 sequence having at least 60%, at least 65%, at least 70%, at least 75%, at least 80%, at least 85%, at least 86%, at least 87%, at least 88%, at least 89%, at least 90%, at least 91%, at least 92%, at least 93%, at least 94%, at least 95%, at least 96%, at least 97%, at least 98%, or at least 99% sequence similarity to any one of SEQ ID NOs: 248-296.

[0196] In some embodiments, the anti-Gal3 antibody or binding fragment thereof comprises a heavy chain variable region (V_{H}) and a light chain variable region (V_{L}). In some embodiments, the V_{H} may comprise a V_{H}-CDR1, a V_{H}-CDR2, and/or a V_{H}-CDR3 selected from any of FIG. 19A-C. In some embodiments, the V_{L} may comprise a V_{L}-CDR1, a V_{L}-CDR2, and/or a V_{L}-CDR3 selected from any of FIG. 20A-C. In some embodiments, the anti-Gal3 antibody or binding fragment thereof comprises CDRs within the V_{H} and V_{L} sequences as illustrated in FIGS. 21 and 22.

[0197] In some embodiments, the anti-Gal3 antibody or binding fragment thereof comprises a heavy chain variable region (V_{H}) sequence selected from FIG. 21 (SEQ ID NOs: 297-373, 803, 806-820, 940, 955-968, 1067-1109, 1415-1439). In some embodiments, the anti-Gal3 antibody or binding fragment thereof comprises a V_{H}- sequence having at least 60%, at least 65%, at least 70%, at least 75%, at least 80%, at least 85%, at least 86%, at least 87%, at least 88%, at least 89%, at least 90%, at least 91%, at least 92%, at least 93%, at least 94%, at least 95%, at least 96%, at least 97%, at least 98%, or at least 99% sequence identity to any one of SEQ ID NOs: 297-373, 803, 806-820, 940, 955-968, 1067-1109, 1415-1439. In some embodiments, the anti-Gal3 antibody or binding fragment thereof comprises a V_{H}- sequence having at least 60%, at least 65%, at least 70%, at least 75%, at least 80%, at least 85%, at least 86%, at least 87%, at least 88%, at least 89%, at least 90%, at least 91%, at least 92%, at least 93%, at least 94%, at least 95%, at least 96%, at least 97%, at least 98%, or at least 99% sequence similarity to any one of SEQ ID NOs: 297-373, 803, 806-820, 940, 955-968, 1067-1109, 1415-1439.

[0198] In some embodiments, the anti-Gal3 antibody or binding fragment thereof comprises a light chain variable region (V_{L}) sequence selected from FIG. 22 (SEQ ID NOs: 374-447, 821-835, 941-943, 969-982, 1110-1152, 1440-1464). In some embodiments, the anti-Gal3 antibody or binding fragment thereof comprises a V_{L} sequence having at least 60%, at least 65%, at least 70%, at least 75%, at least 80%, at least 85%, at least 86%, at least 87%, at least 88%, at least 89%, at least 90%, at least 91%, at least 92%, at least 93%, at least 94%, at least 95%, at least 96%, at least 97%, at least 98%, or at least 99% sequence identity to any one of SEQ ID NOs: 374-447, 821-835, 941-943, 969-982, 1110-1152, 1440-1464. In some embodiments, the anti-Gal3 antibody or binding fragment thereof comprises a VL sequence having at least 60%, at least 65%, at least 70%, at least 75%, at least 80%, at least 85%, at least 86%, at least 87%, at least 88%, at least 89%, at least 90%, at least 91%, at least 92%, at least 93%, at least 94%, at least 95%, at least 96%, at least 97%, at least 98%, or at least 99% sequence similarity to any one of SEQ ID NOs: 374-447, 821-835, 941-943, 969-982, 1110-1152, 1440-1464.

[0199] In some embodiments, the anti-Gal3 antibody or binding fragment thereof comprises a combination of heavy chain variable region and light chain variable region as illustrated in FIG. 24.

[0200] In some embodiments, the anti-Gal3 antibody or binding fragment thereof comprises heavy chain and light chain sequences as illustrated in FIG. 25 (SEQ ID NOs: 448-538, 804-805, 836-865, 983-1010,1153-1238, 1465-1514.

[0201] In some embodiments, the anti-Gal3 antibody or binding fragment thereof is selected from the group of: TB001, TB006, 12G5.D7, 13A12.2E5, 14H10.2C9, 15F10.2D6, 19B5.2E6, 20D11.2C6, 20H5.A3, 23H9.2E4, 2D10.2B2, 3B11.2G2, 7D8.2D8, mIMT001, 4A11.2B5, 4A11.H1L1, 4A11.H4L2, 4G2.2G6, 6B3.2D3, 6H6.2D6, 9H2.2H10, 13G4.2F8, 13H12.2F8, 15G7.2A7, 19D9.2E5, 23B10.2B12, 24D12.2H9, F846C.1B2, F846C.1F5, F846C.1H12, F846C.1H5, F846C.2H3, F846TC.14A2, F846TC.14E4, F846TC.16B5, F846TC.7F10, F847C.10B9, F847C.11B1, F847C.12F12, F847C.26F5, F847C.4B10, F849C.8D10, F849C.8H3, 846.2B11, 846.4D5, 846T.1H2, 847.14H4, 846.2D4, 846.2F11, 846T.10B1, 846T.2E3, 846T.4C9, 846T.4E11, 846T.4F5, 846T.8D1, 847.10C9, 847.11D6, 847.15D12, 847.15F9, 847.15H11, 847.20H7, 847.21B11, 847.27B9, 847.28D1, 847.2B8, 847.3B3, 849.1D2, 849.2D7, 849.2F12, 849.4B2, 849.4F12, 849.4F2, 849.5C2, 849.8D12, F847C.21H6, 849.5H1, 847.23F11, 847.16D10, 847.13E2-mH0mL1, 847.13E2-mH0mL2, 847.12C4, 847.4D3, 2D10-VH0-VL0, 2D10-hVH4-HVL1, 2D10-hVH4-HVL2, 2D10-hVH4-HVL3, 2D10-hVH4-HVL4, 2D10-hVH3-HVL1, 2D10-hVH3-HVL2, 2D10-hVH3-HVL3, 2D10-hVH3-HVL4, 20H5.A3-VH3VL1, 20H5.A3-VH3VL3, 20H5.A3-VH4VL1, 20H5.A3-VH5VL1, 20H5.A3-VH5VL3, 20H5.A3-VH6VL1, 20H5.A3-VH6VL3, or a binding fragment thereof.

[0202] In some embodiments, the anti-Gal3 antibody or binding fragment thereof comprises, consists essentially of, or consists of TB001, TB006, 12G5.D7, 13A12.2E5, 14H10.2C9, 15F10.2D6, 19B5.2E6, 20D11.2C6, 20H5.A3, 23H9.2E4, 2D10.2B2, 3B11.2G2, 7D8.2D8, mIMT001, 4A11.2B5, 4A11.H1L1, 4A11.H4L2, 4G2.2G6, 6B3.2D3, 6H6.2D6, 9H2.2H10, 13G4.2F8, 13H12.2F8, 15G7.2A7, 19D9.2E5, 23B10.2B12, 24D12.2H9, F846C.1B2, F846C.1F5, F846C.1H12, F846C.1H5, F846C.2H3, F846TC.14A2, F846TC.14E4, F846TC.16B5, F846TC.7F10, F847C.10B9, F847C.11B1, F847C.12F12, F847C.26F5, F847C.4B10, F849C.8D10, F849C.8H3, 846.2B11, 846.4D5, 846T.1H2, 847.14H4, 846.2D4, 846.2F11, 846T.10B1, 846T.2E3, 846T.4C9, 846T.4E11, 846T.4F5, 846T.8D1, 847.10C9, 847.11D6, 847.15D12, 847.15F9, 847.15H11, 847.20H7, 847.21B11, 847.27B9, 847.28D1, 847.2B8, 847.3B3, 849.1D2, 849.2D7, 849.2F12, 849.4B2, 849.4F12, 849.4F2, 849.5C2, 849.8D12, F847C.21H6, 849.5H1, 847.23F11, 847.16D10, 847.13E2-mH0mL1, 847.13E2-mH0mL2, 847.12C4, 847.4D3, 2D10-VH0-VL0, 2D10-hVH4-HVL1, 2D10-hVH4-HVL2, 2D10-hVH4-HVL3, 2D10-hVH4-HVL4, 2D10-hVH3-HVL1, 2D10-hVH3-HVL2, 2D10-hVH3-HVL3, 2D10-hVH3-HVL4, 20H5.A3-VH3VL1, 20H5.A3-VH3VL3, 20H5.A3-VH4VL1, 20H5.A3-VH5VL1, 20H5.A3-VH5VL3, 20H5.A3-VH6VL1, 20H5.A3-VH6VL3, or a binding fragment thereof.

[0203] In some embodiments, the anti-Gal3 antibody or binding fragment thereof is selected from the group of: TB001, TB006, 12G5.D7, 13A12.2E5, 14H10.2C9, 15F10.2D6, 19B5.2E6, 20D11.2C6, 20H5.A3, 23H9.2E4, 2D10.2B2, 3B11.2G2, 7D8.2D8, mIMT001, 4A11.2B5, 4A11.H1L1, 4A11.H4L2, 4G2.2G6, 6B3.2D3, 6H6.2D6, 9H2.2H10, 13G4.2F8, 13H12.2F8, 15G7.2A7, 19D9.2E5, 23B10.2B12, 24D12.2H9, F846C.1B2, F846C.1F5, F846C.1H12, F846C.1H5, F846C.2H3, F846TC.14A2, F846TC.14E4, F846TC.16B5, F846TC.7F10, F847C.10B9, F847C.11B1, F847C.12F12, F847C.26F5, F847C.4B10, F849C.8D10, F849C.8H3, 846.2B11, 846.4D5, 846T.1H2, 847.14H4, 846.2D4, 846.2F11, 846T.10B1, 846T.2E3, 846T.4C9, 846T.4E11, 846T.4F5, 846T.8D1, 847.10C9, 847.11D6, 847.15D12, 847.15F9, 847.15H11, 847.20H7, 847.21B11, 847.27B9, 847.28D1, 847.2B8, 847.3B3, 849.1D2, 849.2D7, 849.2F12, 849.4B2, 849.4F12, 849.4F2, 849.5C2, 849.8D12, F847C.21H6, 849.5H1, 847.23F11, 847.16D10, 847.13E2-mH0mL1, 847.13E2-mH0mL2, 847.12C4, 847.4D3, 2D10-VH0-VL0, 2D10-hVH4-HVL1, 2D10-hVH4-HVL2, 2D10-hVH4-HVL3, 2D10-hVH4-HVL4, 2D10-hVH3-HVL1, 2D10-hVH3-HVL2, 2D10-hVH3-HVL3, 2D10-hVH3-HVL4, 20H5.A3-VH3VL1, 20H5.A3-VH3VL3, 20H5.A3-VH4VL1, 20H5.A3-VH5VL1, 20H5.A3-VH5VL3, 20H5.A3-VH6VL1, 20H5.A3-VH6VL3, 2D10.2B2-v2, 2D10-VH0-NDA-VL0, 2D10-VH0-QDT-VL0, 2D10-VH0-SDT-VL0, 2D10-VH0-v1-QDT, 2D10-VH0-v2-QDT, 2D10-hVH1-hVL1, 2D10-hVH1-hVL2, 2D10-hVH1-hVL3, 2D10-hVH1-hVL4, 2D10-hVH2-hVL1, 2D10-hVH2-hVL2, 2D10-hVH2-hVL3, 2D10-hVH2-hVL4, 20H5.A3-hIgG4(S228P), 20H5.A3-hIgG4(S228P)-mv2, 798-9.20H5.A3-mH0mL1, 798-9.20H5.A3-mH1mL0, 798-9.20H5.A3-mH1mL1, 798-9.20H5.A3-mH2mL0, 798-9.20H5.A3-mH2mL1, 20H5.A3-VH1VL1, 20H5.A3-VH1VL2, 20H5.A3-VH1VL3, 20H5.A3-VH1VL4, 20H5.A3-VH1VL5, 20H5.A3-VH1VL6, 20H5.A3-VH2VL3, 20H5.A3-VH2VL4, 20H5.A3-VH2VL5, 20H5.A3-VH2VL6, 20H5.A3-VH3VL5, 20H5.A3-VH3VL6, 20H5.A3-VH4VL3, 20H5.A3-VH4VL4, 20H5.A3-VH4VL5, 20H5.A3-VH4VL6, 20H5.A3-VH5VL5, 20H5.A3-VH5VL6, 20H5.A3-VH6VL4, 20H5.A3-VH6VL5, 20H5.A3-VH6VL6, 20H5.A3-VH7VL1, 20H5.A3-VH7VL2, 20H5.A3-VH7VL3, 20H5.A3-VH7VL4, 20H5.A3-VH7VL5, 20H5.A3-VH7VL6, 20H5.A3_hVH3VL1-hIgG1 (KEMv2), 20H5.A3_hVH3VL1-hIgG1 (LALAPGv2), 20H5.A3_hVH3VL1-hIgG1 (REM), 20H5.A3_hVH5VL1-hIgG1 (KEMv2), 20H5.A3_hVH5VL1-hIgG1 (LALAPGv2), 20H5.A3_hVH5VL1-hIgG1 (REM), 20H5.A3_hVH6VL1-hIgG1 (KEMv2), 20H5.A3_hVH6VL1-hIgG1 (LALAPGv2), 20H5.A3_hVH6VL1-hIgG1 (REM), 21H6-H0L0, 21H6-H1L1, 21H6-H1L2, 21H6-H1L3, 21H6-H1L4, 21H6-H2L1, 21H6-H2L2, 21H6-H2L3, 21H6-H2L4, 21H6-H3L1, 21H6-H3L2, 21H6-H3L3, 21H6-H3L4, 21H6-H4L1, 21H6-H4L2, 21H6-H4L3, 21H6-H4L4, 21H6-H5L1, 21H6-H5L2, 21H6-H5L3, 21H6-H5L4, 21H6-H6L1, 21H6-H6L2, 21H6-H6L3, 21H6-H6L4, or a binding fragment thereof.

[0204] In some embodiments, the anti-Gal3 antibody or binding fragment thereof comprises, consists essentially of, or consists of TB001, TB006, 12G5.D7, 13A12.2E5, 14H10.2C9, 15F10.2D6, 19B5.2E6, 20D11.2C6, 20H5.A3, 23H9.2E4, 2D10.2B2, 3B11.2G2, 7D8.2D8, mIMT001, 4A11.2B5, 4A11.H1L1, 4A11.H4L2, 4G2.2G6, 6B3.2D3, 6H6.2D6, 9H2.2H10, 13G4.2F8, 13H12.2F8, 15G7.2A7, 19D9.2E5, 23B10.2B12, 24D12.2H9, F846C.1B2, F846C.1F5, F846C.1H12, F846C.1H5, F846C.2H3, F846TC.14A2, F846TC.14E4, F846TC.16B5, F846TC.7F10, F847C.10B9, F847C.11B1, F847C.12F12, F847C.26F5, F847C.4B10, F849C.8D10, F849C.8H3, 846.2B11, 846.4D5, 846T.1H2, 847.14H4, 846.2D4, 846.2F11, 846T.10B1, 846T.2E3, 846T.4C9, 846T.4E11, 846T.4F5, 846T.8D1, 847.10C9, 847.11D6, 847.15D12, 847.15F9, 847.15H11, 847.20H7, 847.21B11, 847.27B9, 847.28D1, 847.2B8, 847.3B3, 849.1D2, 849.2D7, 849.2F12, 849.4B2, 849.4F12, 849.4F2, 849.5C2, 849.8D12, F847C.21H6, 849.5H1, 847.23F11, 847.16D10, 847.13E2-mH0mL1, 847.13E2-mH0mL2, 847.12C4, 847.4D3, 2D10-VH0-VL0, 2D10-hVH4-HVL1, 2D10-hVH4-HVL2, 2D10-hVH4-HVL3, 2D10-hVH4-HVL4, 2D10-hVH3-HVL1, 2D10-hVH3-HVL2, 2D10-hVH3-HVL3, 2D10-hVH3-HVL4, 20H5.A3-VH3VL1, 20H5.A3-VH3VL3, 20H5.A3-VH4VL1, 20H5.A3-VH5VL1, 20H5.A3-VH5VL3, 20H5.A3-VH6VL1, 20H5.A3-VH6VL3, 2D10.2B2-v2, 2D10-VH0-NDA-VL0, 2D10-VH0-QDT-VL0, 2D10-VH0-SDT-VL0, 2D10-VH0-v1-QDT, 2D10-VH0-v2-QDT, 2D10-hVH1-hVL1, 2D10-hVH1-hVL2, 2D10-hVH1-hVL3, 2D10-hVH1-hVL4, 2D10-hVH2-hVL1, 2D10-hVH2-hVL2, 2D10-hVH2-hVL3, 2D10-hVH2-hVL4, 20H5.A3-hIgG4(S228P), 20H5.A3-hIgG4(S228P)-mv2, 798-9.20H5.A3-mH0mL1, 798-9.20H5.A3-mH1mL0, 798-9.20H5.A3-mH1mL1, 798-9.20H5.A3-mH2mL0, 798-9.20H5.A3-mH2mL1, 20H5.A3-VH1VL1, 20H5.A3-VH1VL2, 20H5.A3-VH1VL3, 20H5.A3-VH1VL4, 20H5.A3-VH1VL5, 20H5.A3-VH1VL6, 20H5.A3-VH2VL3, 20H5.A3-VH2VL4, 20H5.A3-VH2VL5, 20H5.A3-VH2VL6, 20H5.A3-VH3VL5, 20H5.A3-VH3VL6, 20H5.A3-VH4VL3, 20H5.A3-VH4VL4, 20H5.A3-VH4VL5, 20H5.A3-VH4VL6, 20H5.A3-VH5VL5, 20H5.A3-VH5VL6, 20H5.A3-VH6VL4, 20H5.A3-VH6VL5, 20H5.A3-VH6VL6, 20H5.A3-VH7VL1, 20H5.A3-VH7VL2, 20H5.A3-VH7VL3, 20H5.A3-VH7VL4, 20H5.A3-VH7VL5, 20H5.A3-VH7VL6, 20H5.A3_hVH3VL1-hIgG1 (KEMv2), 20H5.A3_hVH3VL1-hIgG1 (LALAPGv2), 20H5.A3_hVH3VL1-hIgG1 (REM), 20H5.A3_hVH5VL1-hIgG1 (KEMv2), 20H5.A3_hVH5VL1-hIgG1 (LALAPGv2), 20H5.A3_hVH5VL1-hIgG1 (REM), 20H5.A3_hVH6VL1-hIgG1 (KEMv2), 20H5.A3_hVH6VL1-hIgG1 (LALAPGv2), 20H5.A3_hVH6VL1-hIgG1 (REM), 21H6-H0L0, 21H6-H1L1, 21H6-H1L2, 21H6-H1L3, 21H6-H1L4, 21H6-H2L1, 21H6-H2L2, 21H6-H2L3, 21H6-H2L4, 21H6-H3L1, 21H6-H3L2, 21H6-H3L3, 21H6-H3L4, 21H6-H4L1, 21H6-H4L2, 21H6-H4L3, 21H6-H4L4, 21H6-H5L1, 21H6-H5L2, 21H6-H5L3, 21H6-H5L4, 21H6-H6L1, 21H6-H6L2, 21H6-H6L3, 21H6-H6L4, or a binding fragment thereof.

[0205] In some embodiments, the anti-Gal3 antibody or binding fragment thereof comprises one or more heavy chain variable region CDRs depicted in FIG. 19A-C. In some embodiments, the anti-Gal3 antibody or binding fragment thereof comprises one or more light chain variable region CDRs depicted in FIG. 20A-C. In some embodiments, the anti-Gal3 antibody or binding fragment thereof comprises a heavy chain variable region depicted in FIG. 21. In some embodiments, the anti-Gal3 antibody or binding fragment thereof comprises a light chain variable region depicted in FIG. 22. In some embodiments, the anti-Gal3 antibody or binding fragment thereof comprises a combination of heavy chain variable region and light chain variable region depicted in FIG. 24. In some embodiments, the anti-Gal3 antibody or binding fragment thereof comprises a heavy chain and/or light chain depicted in FIG. 25. In some embodiments, the anti-Gal3 antibody or binding fragment thereof can comprise or include any one or more of the sequences provided in any one or more of FIG. 19A-C, 20A-C, 21, 22, 23, 24, 25, or any one or more of a sequence that is at least 80%, 81%, 82%, 83%, 84%, 85%, 86%, 87%, 88%, 89%, 90%, 91%, 92%, 93%, 94%, 95%, 96%, 97%, 98%, 99% or greater identical thereto. In some embodiments, the anti-Gal3 antibody or binding fragment thereof can comprise or include any one or more of the sequences provided in any one or more of FIG. 19A-C, 20A-C, 21, 22, 23, 24, 25, or any one or more of a sequence that is at least 80%, 81%, 82%, 83%, 84%, 85%, 86%, 87%, 88%, 89%, 90%, 91%, 92%, 93%, 94%, 95%, 96%, 97%, 98%, 99% or greater similar thereto.

[0206] In some embodiments, the anti-Gal3 antibody or binding fragment thereof comprises (1) a heavy chain variable region comprising a V_{H}-CDR1, a V_{H}-CDR2, and a V_{H}-CDR3; and (2) a light chain variable region comprising a V_{L}-CDR1, a V_{L}-CDR2, and a VL-CDR3. In some embodiments, the V_{H}-CDR1 comprises an amino acid sequence having at least 80%, 81%, 82%, 83%, 84%, 85%, 86%, 87%, 88%, 89%, 90%, 91%, 92%, 93%, 94%, 95%, 96%, 97%, 98%, 99%, or 100% identity to the amino acid sequence of SEQ ID NO: 32, 37, or 66. In some embodiments, the V_{H}-CDR2 comprises an amino acid sequence having at least 80%, 81%, 82%, 83%, 84%, 85%, 86%, 87%, 88%, 89%, 90%, 91%, 92%, 93%, 94%, 95%, 96%, 97%, 98%, 99%, or 100% identity to the amino acid sequence of SEQ ID NO: 801, 951, 952, 77, or 108. In some embodiments, the V_{H}-CDR3 comprises an amino acid sequence having at least 80%, 81%, 82%, 83%, 84%, 85%, 86%, 87%, 88%, 89%, 90%, 91%, 92%, 93%, 94%, 95%, 96%, 97%, 98%, 99%, or 100% identity to the amino acid sequence of SEQ ID NO: 953, 954, 802, 118, or 164. In some embodiments, the V_{L}-CDR1 comprises an amino acid sequence having at least 80%, 81%, 82%, 83%, 84%, 85%, 86%, 87%, 88%, 89%, 90%, 91%, 92%, 93%, 94%, 95%, 96%, 97%, 98%, 99%, or 100% identity to the amino acid sequence of SEQ ID NO: 171, 178, or 215. In some embodiments, the V_{L}-CDR2 comprises an amino acid sequence having at least 80%, 81%, 82%, 83%, 84%, 85%, 86%, 87%, 88%, 89%, 90%, 91%, 92%, 93%, 94%, 95%, 96%, 97%, 98%, 99%, or 100% identity to the amino acid sequence of SEQ ID NO: 222, 229, or 225. In some embodiments, the V_{L}-CDR3 comprises an amino acid sequence having at least 80%, 81%, 82%, 83%, 84%, 85%, 86%, 87%, 88%, 89%, 90%, 91%, 92%, 93%, 94%, 95%, 96%, 97%, 98%, 99%, or 100% identity to the amino acid sequence of SEQ ID NO: 257, 256, or 291.

[0207] In some embodiments, the heavy chain variable region comprises an amino acid sequence having at least 80%, 81%, 82%, 83%, 84%, 85%, 86%, 87%, 88%, 89%, 90%, 91%, 92%, 93%, 94%, 95%, 96%, 97%, 98%, 99%, or 100% identity to any one of the amino acid sequences of SEQ ID NOs: 806-820, 955-968, 1067-1109, 1415-1439. In some embodiments, the light chain variable region comprises an amino acid sequence having at least 80%, 81%, 82%, 83%, 84%, 85%, 86%, 87%, 88%, 89%, 90%, 91%, 92%, 93%, 94%, 95%, 96%, 97%, 98%, 99%, or 100% identity to any one of the amino acid sequences of SEQ ID NOs: 821-835, 969-982, 1110-1152, 1440-1464.

[0208] In some embodiments, the anti-Gal3 antibody or binding fragment thereof comprises a heavy chain, wherein the heavy chain comprises an amino acid sequence having at least 80%, 81%, 82%, 83%, 84%, 85%, 86%, 87%, 88%, 89%, 90%, 91%, 92%, 93%, 94%, 95%, 96%, 97%, 98%, 99%, or 100% identity to any one of the amino acid sequences of SEQ ID NOs: 836-850,983-996, 1153-1195, 1411, 1465-1489. In some embodiments, the anti-Gal3 antibody or binding fragment thereof comprises a light chain, wherein the light chain comprises an amino acid sequence having at least 80%, 81%, 82%, 83%, 84%, 85%, 86%, 87%, 88%, 89%, 90%, 91%, 92%, 93%, 94%, 95%, 96%, 97%, 98%, 99%, or 100% identity to any one of the amino acid sequences of SEQ ID NOs: 851-865, 997-1010, 1196-1238, 1412, 1490-1514.

[0209] In some embodiments, the anti-Gal3 antibody or binding fragment thereof is selected from the group consisting of: 20H5.A3, 20H5.A3-VH3VL1, 20H5.A3-VH3VL3, 20H5.A3-VH4VL1, 20H5.A3-VH5VL1, 20H5.A3-VH5VL3, 20H5.A3-VH6VL1, 20H5.A3-VH6VL3, or binding fragment thereof.

[0210] In some embodiments, the anti-Gal3 antibody or binding fragment thereof is selected from the group consisting of: 20H5.A3, 20H5.A3-VH3VL1, 20H5.A3-VH3VL3, 20H5.A3-VH4VL1, 20H5.A3-VH5VL1, 20H5.A3-VH5VL3, 20H5.A3-VH6VL1, 20H5.A3-VH6VL3, 20H5.A3-hIgG4(S228P), 20H5.A3-hIgG4(S228P)-mv2, 798-9.20H5.A3-mH0mL1, 798-9.20H5.A3-mH1mL0, 798-9.20H5.A3-mH1mL1, 798-9.20H5.A3-mH2mL0, 798-9.20H5.A3-mH2mL1, 20H5.A3-VH1VL1, 20H5.A3-VH1VL2, 20H5.A3-VH1VL3, 20H5.A3-VH1VL4, 20H5.A3-VH1VL5, 20H5.A3-VH1VL6, 20H5.A3-VH2VL3, 20H5.A3-VH2VL4, 20H5.A3-VH2VL5, 20H5.A3-VH2VL6, 20H5.A3-VH3VL5, 20H5.A3-VH3VL6, 20H5.A3-VH4VL3, 20H5.A3-VH4VL4, 20H5.A3-VH4VL5, 20H5.A3-VH4VL6, 20H5.A3-VH5VL5, 20H5.A3-VH5VL6, 20H5.A3-VH6VL4, 20H5.A3-VH6VL5, 20H5.A3-VH6VL6, 20H5.A3-VH7VL1, 20H5.A3-VH7VL2, 20H5.A3-VH7VL3, 20H5.A3-VH7VL4, 20H5.A3-VH7VL5, 20H5.A3-VH7VL6, 20H5.A3_hVH3VL1-hIgG1 (KEMv2), 20H5.A3_hVH3VL1-hIgG1 (LALAPGv2), 20H5.A3_hVH3VL1-hIgG1 (REM), 20H5.A3_hVH5VL1-hIgG1 (KEMv2), 20H5.A3_hVH5VL1-hIgG1 (LALAPGv2), 20H5.A3_hVH5VL1-hIgG1 (REM), 20H5.A3_hVH6VL1-hIgG1 (KEMv2), 20H5.A3_hVH6VL1-hIgG1 (LALAPGv2), 20H5.A3_hVH6VL1-hIgG1 (REM), or binding fragment thereof.

[0211] In some embodiments, the anti-Gal3 antibody or binding fragment thereof is selected from the group consisting of: 2D10-VH0-VL0, 2D10-hVH4-HVL1, 2D10-hVH4-HVL2, 2D10-hVH4-HVL3, 2D10-hVH4-HVL4, 2D10-hVH3-HVL1, 2D10-hVH3-HVL2, 2D10-hVH3-HVL3, 2D10-hVH3-HVL4, or binding fragment thereof.

[0212] In some embodiments, the anti-Gal3 antibody or binding fragment thereof is selected from the group consisting of: 2D10-VH0-VL0, 2D10-hVH4-HVL1, 2D10-hVH4-HVL2, 2D10-hVH4-HVL3, 2D10-hVH4-HVL4, 2D10-hVH3-HVL1, 2D10-hVH3-HVL2, 2D10-hVH3-HVL3, 2D10-hVH3-HVL4, 2D10.2B2-v2, 2D10-VH0-NDA-VL0, 2D10-VH0-QDT-VL0, 2D10-VH0-SDT-VL0, 2D10-VH0-v1-QDT, 2D10-VH0-v2-QDT, 2D10-hVH1-hVL1, 2D10-hVH1-hVL2, 2D10-hVH1-hVL3, 2D10-hVH1-hVL4, 2D10-hVH2-hVL1, 2D10-hVH2-hVL2, 2D10-hVH2-hVL3, 2D10-hVH2-hVL4, or binding fragment thereof.

[0213] In some embodiments, the anti-Gal3 antibody or binding fragment thereof is selected from the group consisting of: 21H6-H0L0, 21H6-H1L1, 21H6-H1L2, 21H6-H1L3, 21H6-H1L4, 21H6-H2L1, 21H6-H2L2, 21H6-H2L3, 21H6-H2L4, 21H6-H3L1, 21H6-H3L2, 21H6-H3L3, 21H6-H3L4, 21H6-H4L1, 21H6-H4L2, 21H6-H4L3, 21H6-H4L4, 21H6-H5L1, 21H6-H5L2, 21H6-H5L3, 21H6-H5L4, 21H6-H6L1, 21H6-H6L2, 21H6-H6L3, 21H6-H6L4, or binding fragment thereof.

[0214] In some embodiments, the anti-Gal3 antibody or binding fragment thereof comprises a humanized antibody or binding fragment thereof. In other instances, the anti-Gal3 antibody or binding fragment thereof comprises a chimeric antibody or binding fragment thereof. In some embodiments, the anti-Gal3 antibody comprises a full-length antibody or a binding fragment thereof. In some embodiments, the anti-Gal3 antibody or binding fragment thereof comprises a bispecific antibody or a binding fragment thereof. In some embodiments, the anti-Gal3 antibody or binding fragment thereof comprises a monovalent Fab′, a divalent Fab2, a single-chain variable fragment (scFv), a diabody, a minibody, a nanobody, a single-domain antibody (sdAb), or a camelid antibody or binding fragment thereof.

[0215] In some embodiments, the anti-Gal3 antibody or binding fragment thereof is a bispecific antibody or binding fragment thereof. Exemplary bispecific antibody formats include, but are not limited to, Knobs-into-Holes (KiH), Asymmetric Re-engineering Technology-immunoglobulin (ART-Ig), Triomab quadroma, bispecific monoclonal antibody (BiMAb, BsmAb, BsAb, bsMab, BS-Mab, or Bi-MAb), Azymetric, Biclonics, Fab-scFv-Fc, Two-in-one/Dual Action Fab (DAF), FinomAb, scFv-Fc-(Fab)-fusion, Dock-aNd-Lock (DNL), Tandem diAbody (TandAb), Dual-affinity-ReTargeting (DART), nanobody, triplebody, tandems scFv (taFv), triple heads, tandem dAb/VHH, triple dAb/VHH, or tetravalent dAb/VHH. In some embodiments, the anti-Gal3 antibody or binding fragment thereof is a bispecific antibody or binding fragment thereof comprising a bispecific antibody format illustrated in Brinkmann and Kontermann, “The making of bispecific antibodies,” MABS 9(2): 182-212 (2017).

[0216] In some embodiments, the anti-Gal3 antibody or binding fragment thereof can comprise an IgM, IgG (e.g., IgG1, IgG2, IgG3, or IgG4), IgA, or IgE framework. The IgG framework can be IgG1, IgG2, IgG3 or IgG4. In some embodiments, the anti-Gal3 antibody or binding fragment thereof comprises an IgG1 framework. In some embodiments, the anti-Gal3 antibody or binding fragment thereof comprises an IgG2 framework. In some embodiments, the anti-Gal3 antibody or binding fragment thereof comprises an IgG4 framework. The anti-Gal3 antibody or binding fragment thereof can further comprise a Fc mutation.

[0217] In some embodiments, the Fc region comprises one or more mutations that modulate Fc receptor interactions, e.g., to enhance effector functions such as ADCC and/or CDC. In such instances, exemplary residues when mutated modulate effector functions include S239, K326, A330, 1332, or E333, in which the residue position correspond to IgG1 and the residue numbering is in accordance to Kabat numbering (EU index of Kabat et al 1991 Sequences of Proteins of Immunological Interest). In some embodiments, the one or more mutations comprise S239D, K326W, A330L, 1332E, E333A, E333S, or a combination thereof. In some embodiments, the one or more mutations comprise S239D, 1332E, or a combination thereof. In some embodiments, the one or more mutations comprise S239D, A330L, 1332E, or a combination thereof. In some embodiments, the one or more mutations comprise K326W, E333S, or a combination thereof. In some embodiments, the mutation comprises E333A.

[0218] In some embodiments, an anti-Gal3 antibody or binding fragment thereof comprises a humanization score of above 70, above 80, above 81, above 82, above 83, above 84, above 85, above 86, above 87, above 88, above 89, above 90, or above 95. In some embodiments, the anti-Gal3 antibody or binding fragment thereof comprises a humanization score of above 80. In some embodiments, the anti-Gal3 antibody or binding fragment thereof comprises a humanization score of above 83. In some embodiments, the anti-Gal3 antibody or binding fragment thereof comprises a humanization score of above 85. In some embodiments, the anti-Gal3 antibody or binding fragment thereof comprises a humanization score of above 87. In some embodiments, the anti-Gal3 antibody or binding fragment thereof comprises a humanization score of above 90. In some embodiments, the anti-Gal3 antibody or binding fragment thereof comprises a humanization score of the heavy chain of above 70, above 80, above 81, above 82, above 83, above 84, above 85, above 86, above 87, above 88, above 89, above 90, or above 95, optionally above 80, above 85, or above 87. In some embodiments, the anti-Gal3 antibody or binding fragment thereof comprises a humanization score of the light chain of above 70, above 80, above 81, above 82, above 83, above 84, above 85, above 86, above 87, above 88, above 89, above 90, or above 95, optionally above 80, above 83, or above 85.

[0219] Also disclosed herein are proteins. In some embodiments, the proteins comprise one or more of SEQ ID NOs: 27-538, 801-865, 955-1010, 1067-1238, 1415-1514. In some embodiments, the proteins comprise a sequence having at least 80%, 81%, 82%, 83%, 84%, 85%, 86%, 87%, 88%, 89%, 90%, 91%, 92%, 93%, 94%, 95%, 96%, 97%, 98%, 99%, or 100% identity to one or more of SEQ ID NOs: 27-538, 801-865, 955-1010, 1067-1238, 1415-1514. In some embodiments, the proteins comprise a sequence having at least 0, 1, 2, 3, 4, 5, or 6 substitutions relative to any one or more sequences of SEQ ID NOs: 27-538, 801-865, 955-1010, 1067-1238, 1415-1514. In some embodiments, the proteins comprise six sequences selected from each of SEQ ID NOs: 27-70; SEQ ID NOs: 71-111, 801, 951, 952; SEQ ID NOs: 112-169, 802, 953, 954; SEQ ID NOs: 170-220; SEQ ID NOs: 221-247; SEQ ID NOs: 248-296. In some embodiments, the proteins comprise two sequences selected from each of SEQ ID NOs: 279-373, 803, 806-820, 955-968, 1067-1190, 1415-1439 and SEQ ID NOs: 374-447, 821-835, 969-982, 1110-1152, 1440-1464. In some embodiments, the proteins comprise two sequences selected from each of SEQ ID NOs: 448-494, 804, 836-850, 983-996, 1153-1195, 1465-1489 and SEQ ID NOs: 495-538, 805, 851-865, 997-1010, 1196-1238, 1490-1514. In some embodiments, the proteins comprise any one or more of the sequences depicted in FIGS. 19A-C, 20A-C, 21, 22, 23, 24, 25.

[0220] In some embodiments, the protein comprises one or more sequences defined by a consensus sequence. The consensus sequences provided herein have been derived from the alignments of CDRs depicted in FIG. 37A-B. However, it is envisioned that alternative alignments may be done (e.g. using global or local alignment, or with different algorithms, such as Hidden Markov Models, seeded guide trees, Needleman-Wunsch algorithm, or Smith-Waterman algorithm) and as such, alternative consensus sequences can be derived.

[0221] In some embodiments, the protein comprises a sequence defined by the formula X₁X₂X₃X₄X₅X₆X₇X₈X₉X₁₀X₁₁X₁₂X₁₃X₁₄X₁₅X₁₆X₁₇, where X₁ is no amino acid or R; X₂ is no amino acid or S; X₃ is no amino acid, S, or T; X₄ is no amino acid, E, G, K, Q, or R; X₅ is no amino acid, A, D, G, I, N, or S; X₆ is no amino acid, I, L, or V; X₇ is no amino acid, F, L, S, or V; X₈ is no amino acid, D, E, H, N, S, T, or Y; X₉ is no amino acid, D, E, I, K, N, R, S, T, or V; X₁₀ is no amino acid, D, H, N, R, S, or Y; X₁₁ is no amino acid, A, G, N, S, T, or V; X₁₂ is no amino acid, A, I, K, N, Q, T, V, or Y; X₁₃ is no amino acid, D, G, H, K, N, S, T, or Y; X₁₄ is no amino acid, C, F, I, N, S, T, V, or Y; X₁₅ is no amino acid, D, L, N, W, or Y; X₁₆ is no amino acid, N, or D; X₁₇ is no amino acid or D. In some embodiments, the protein comprises a sequence having at least 80%, 81%, 82%, 83%, 84%, 85%, 86%, 87%, 88%, 89%, 90%, 91%, 92%, 93%, 94%, 95%, 96%, 97%, 98%, 99%, or 100% identity to this consensus sequence. In some embodiments, the protein comprises a sequence having 0, 1, 2, 3, 4, 5, or 6 substitutions from this consensus sequence.

[0222] In some embodiments, the protein comprises a sequence defined by the formula X₁X₂X₃X₄X₅X₆X₇X₈, where X₁ is no amino acid, K, L, N, Q, or R; X₂ is no amino acid, A, L, M, or V; X₃ is no amino acid, C, K, or S; X₄ is no amino acid or T; X₅ is no amino acid, A, E, F, G, H, K, Q, R, S, W, or Y; X₆ is no amino acid, A, G, or T; X₇ is no amino acid, I, K, N, S, or T; X₈ is no amino acid, N, or S. In some embodiments, the protein comprises a sequence having at least 80%, 81%, 82%, 83%, 84%, 85%, 86%, 87%, 88%, 89%, 90%, 91%, 92%, 93%, 94%, 95%, 96%, 97%, 98%, 99%, or 100% identity to this consensus sequence. In some embodiments, the protein comprises a sequence having 0, 1, 2, 3, 4, 5, or 6 substitutions from this consensus sequence.

[0223] In some embodiments, the protein comprises a sequence defined by the formula X₁X₂X₃X₄X₅X₆X₇X₈X₉X₁₀, where X₁ is no amino acid, A, E, F, H, L, M, Q, S, V, or W; X₂ is A, H, or Q; X₃ is D, F, G, H, L, M, N, Q, S, T, W, or Y; X₄ is no amino acid or W; X₅ is A, D, I, K, L, N, Q, R, S, T, V, or Y; X₆ is D, E, H, I, K, L, N, Q, S, or T; X₇ is D, F, K, L, N, P, S, T, V, W, or Y; X₈ is H, P, or S; X₉ is F, L, P, Q, R, T, W, or Y; X₁₀ is no amino acid, T, or V. In some embodiments, the protein comprises a sequence having at least 80%, 81%, 82%, 83%, 84%, 85%, 86%, 87%, 88%, 89%, 90%, 91%, 92%, 93%, 94%, 95%, 96%, 97%, 98%, 99%, or 100% identity to this consensus sequence. In some embodiments, the protein comprises a sequence having 0, 1, 2, 3, 4, 5, or 6 substitutions from this consensus sequence.

[0224] In some embodiments, the protein comprises a sequence defined by the formula X₁X₂X₃X₄X₅X₆X₇X₈X₉X₁₀, where X₁ is E, G, or R; X₂ is F, N, or Y; X₃ is A, I, K, N, S, or T; X₄ is F, I, or L; X₅ is I, K, N, R, S, or T; X₆ is D, G, I, N, S, or T; X₇ is F, G, H, S, or Y; X₈ is no amino acid, A, D, G, I, M, N, T, V, W, or Y; X₉ is no amino acid, M, or Y; X₁₀ is no amino acid or G; In some embodiments, the protein comprises a sequence having at least 80%, 81%, 82%, 83%, 84%, 85%, 86%, 87%, 88%, 89%, 90%, 91%, 92%, 93%, 94%, 95%, 96%, 97%, 98%, 99%, or 100% identity to this consensus sequence. In some embodiments, the protein comprises a sequence having 0, 1, 2, 3, 4, 5, or 6 substitutions from this consensus sequence.

[0225] In some embodiments, the protein comprises a sequence defined by the formula X₁X₂X₃X₄X₅X₆X₇X₈X₉X₁₀, where X₁ is no amino acid, I, or L; X₂ is no amino acid or R; X₃ is no amino acid, F, I, L, or V; X₄ is A, D, F, H, K, L, N, S, W, or Y; X₅ is A, D, P, S, T, W, or Y; X₆ is D, E, G, H, K, N, S, V, or Y; X₇ is D, E, G, N, S, or T; X₈ is D, G, I, K, N, Q, R, S, V, or Y; X₉ is A, D, E, G, I, K, N, P, S, T, V, or Y; X₁₀ is no amino acid, I, P, S, or T. In some embodiments, the protein comprises a sequence having at least 80%, 81%, 82%, 83%, 84%, 85%, 86%, 87%, 88%, 89%, 90%, 91%, 92%, 93%, 94%, 95%, 96%, 97%, 98%, 99%, or 100% identity to this consensus sequence. In some embodiments, the protein comprises a sequence having 0, 1, 2, 3, 4, 5, or 6 substitutions from this consensus sequence.

[0226] In some embodiments, the protein comprises a sequence defined by the formula X₁X₂X₃X₄X₅X₆X₇X₈X₉X₁₀X₁₁X₁₂X₁₃X₁₄X₅X₁₆X₁₇X₁₈X₁₉X₂₀X₂₁X₂₂X₂₃X₂₄X₂₅, where X₁ is no amino acid or A; X₂ is no amino acid, A, R, or Y; X₃ is no amino acid, A, F, H, K, L, R, S, or V; X₄ is no amino acid, A, D, K, N, R, S, or T; X₅ is no amino acid, A, D, G, H, I, L, N, P, R, S, T, V, or Y; X₆ is no amino acid, A, D, G, H, K, N, P, Q, R, S, or Y; X₇ is no amino acid, D, F, G, H, P, R, S, W, or Y; X₈ is no amino acid, A, D, E, G, I, R, or S; X₉ is no amino acid, A, C, D, E, F, G, I, N, R, S, T, V, or Y; X₁₀ is no amino acid, A, D, M, P, R, S, T, V, or Y; X₁₁ is no amino acid, A, D, E, F, L, T, V, or Y; X₁₂ is no amino acid, A, G, L, M, R, or T; X₁₃ is no amino acid, A, D, E, F, G, R, S, T, or V; X₁₄ is no amino acid, A, D, G, L, P, Q, R, S, T, V, or Y; X₁₅ is no amino acid, A, D, G, N, S, V, W, or Y; X₁₆ is no amino acid, A, D, E, F, L, P, T, V, W, or Y; X₁₇ is no amino acid, F, I, L, M, R, or Y; X₁₈ is no amino acid, A, D, G, N, or T; X₁₉ is no amino acid, F, N, S, T, V, or Y; X₂₀ is no amino acid or L; X₂₁ is no amino acid or A; X₂₂ is no amino acid or W; X₂₃ is no amino acid or F; X₂₄ is no amino acid or A; X₂₅ is no amino acid or Y. In some embodiments, the protein comprises a sequence having at least 80%, 81%, 82%, 83%, 84%, 85%, 86%, 87%, 88%, 89%, 90%, 91%, 92%, 93%, 94%, 95%, 96%, 97%, 98%, 99%, or 100% identity to this consensus sequence. In some embodiments, the protein comprises a sequence having 0, 1, 2, 3, 4, 5, or 6 substitutions from this consensus sequence.

### Pharmaceutical Formulations

[0227] A pharmaceutical formulation for treating a disease as described herein can comprise an anti-Gal3 antibody or binding fragment thereof described supra. The anti-Gal3 antibody or binding fragment thereof can be formulated for systemic administration. Alternatively, the anti-Gal3 antibody or binding fragment thereof can be formulated for parenteral administration.

[0228] In some embodiments, an anti-Gal3 antibody or binding fragment thereof is formulated as a pharmaceutical composition for administration to a subject by, but not limited to, parenteral (e.g., intravenous, subcutaneous, intramuscular, intraarterial, intradermal, intraperitoneal, intravitreal, intracerebral, or intracerebroventricular), oral, intranasal, buccal, rectal, or transdermal administration routes. In some instances, the pharmaceutical composition describe herein is formulated for parenteral (e.g., intravenous, subcutaneous, intramuscular, intraarterial, intradermal, intraperitoneal, intravitreal, intracerebral, or intracerebroventricular) administration. In other instances, the pharmaceutical composition describe herein is formulated for systemic administration. In other instances, the pharmaceutical composition describe herein is formulated for oral administration. In still other instances, the pharmaceutical composition describe herein is formulated for intranasal administration.

[0229] In some instances, the pharmaceutical compositions further include pH adjusting agents or buffering agents which include acids such as acetic, boric, citric, lactic, phosphoric and hydrochloric acids; bases such as sodium hydroxide, sodium phosphate, sodium borate, sodium citrate, sodium acetate, sodium lactate and tris-hydroxymethylaminomethane; and buffers such as citrate/dextrose, sodium bicarbonate and ammonium chloride. Such acids, bases and buffers are included in an amount required to maintain pH of the composition in an acceptable range.

[0230] In some instances, the pharmaceutical compositions include one or more salts in an amount required to bring osmolality of the composition into an acceptable range. Such salts include those having sodium, potassium or ammonium cations and chloride, citrate, ascorbate, borate, phosphate, bicarbonate, sulfate, thiosulfate or bisulfite anions; suitable salts include sodium chloride, potassium chloride, sodium thiosulfate, sodium bisulfite and ammonium sulfate.

[0231] In some instances, the pharmaceutical compositions further include diluent which are used to stabilize compounds because they can provide a more stable environment. Salts dissolved in buffered solutions (which also can provide pH control or maintenance) are utilized as diluents in the art, including, but not limited to a phosphate buffered saline solution. In certain instances, diluents increase bulk of the composition to facilitate compression or create sufficient bulk for homogenous blend for capsule filling. Such compounds can include e.g., lactose, starch, mannitol, sorbitol, dextrose, microcrystalline cellulose such as Avicel®; dibasic calcium phosphate, dicalcium phosphate dihydrate; tricalcium phosphate, calcium phosphate; anhydrous lactose, spray-dried lactose; pregelatinized starch, compressible sugar, such as Di-Pac® (Amstar); mannitol, hydroxypropylmethylcellulose, hydroxypropylmethylcellulose acetate stearate, sucrose-based diluents, confectioner's sugar; monobasic calcium sulfate monohydrate, calcium sulfate dihydrate; calcium lactate trihydrate, dextrates; hydrolyzed cereal solids, amylose; powdered cellulose, calcium carbonate; glycine, kaolin; mannitol, sodium chloride; inositol, bentonite, and the like.

[0232] In some embodiments, the pharmaceutical formulations include, but are not limited to, aqueous liquid dispersions, self-emulsifying dispersions, solid solutions, liposomal dispersions, aerosols, solid dosage forms, powders, immediate release formulations, controlled release formulations, fast melt formulations, tablets, capsules, pills, delayed release formulations, extended release formulations, pulsatile release formulations, multiparticulate formulations (e.g., nanoparticle formulations), and mixed immediate and controlled release formulations.

[0233] In some instances, the pharmaceutical formulation can further comprise an additional therapeutic agent. Non-limiting examples of additional therapeutic agents include alpha-glucosidase inhibitors, including acarbose (Precose®) and miglitol (Glyset®); biguanides, including metformin-alogliptin (Kazano®), metformin-canagliflozin (Invokamet®), metformin-dapagliflozin (Xigduo® XR), metformin-empagliflozin (Synjardy®), metformin-glipizide, metformin-glyburide (Glucovance®), metformin-linagliptin (Jentadueto®), metformin-pioglitazone (Actoplus®), metformin-repaglinide (PrandiMet®), metformin-rosiglitazone (Avandamet®), metformin-saxagliptin (Kombiglyze® XR), and metformin-sitagliptin (Janumet®); dopamine agonists, including Bromocriptine (Cycloset®); Dipeptidyl peptidase-4 (DPP-4) inhibitors, including alogliptin (Nesina®), alogliptin-metformin (Kazano®), alogliptin-pioglitazone (Oseni®), linagliptin (Tradjenta®), linagliptin-empagliflozin (Glyxambi®), linagliptin-metformin (Jentadueto®), saxagliptin (Onglyza®), saxagliptin-metformin (Kombiglyze® XR), sitagliptin (Januvia®), sitagliptin-metformin (Janumet® and Janumet® XR), and sitagliptin and simvastatin (Juvisync®); Glucagon-like peptide-1 receptor agonists (GLP-1 receptor agonists), including albiglutide (Tanzeum®), dulaglutide (Trulicity®), exenatide (Byetta®), exenatide extended-release (Bydureon®), and liraglutide (Victoza®), semaglutide (Ozempic®); Meglitinides, including nateglinide (Starlix®), repaglinide (Prandin®), and repaglinide-metformin (Prandimet®); Sodium-glucose transporter (SGLT) 2 inhibitors, including dapagliflozin (Farxiga®), dapagliflozin-metformin (Xigduo® XR), canagliflozin (Invokana®), canagliflozin-metformin (Invokamet®), empagliflozin (Jardiance®), empagliflozin-linagliptin (Glyxambi®), empagliflozin-metformin (Synjardy®), and ertugliflozin (Steglatro®); Sulfonylureas, including glimepiride (Amaryl®), glimepiride-pioglitazone (Duetact®), glimepiride-rosiglitazone (Avandaryl®), gliclazide, glipizide (Glucotrol®), glipizide-metformin (Metaglip®), glyburide (DiaBeta®, Glynase®, Micronase®), glyburide-metformin (Glucovance®), chlorpropamide (Diabinese®), tolazamide (Tolinase®), and tolbutamide (Orinase®, Tol-Tab®); Thiazolidinediones, including rosiglitazone (Avandia®), rosiglitazone-glimepiride (Avandaryl®), rosiglitazone-metformin (Amaryl M®), pioglitazone (Actos®), pioglitazone-alogliptin (Oseni®), pioglitazone-glimepiride (Duetact®), pioglitazone-metformin (Actoplus Met®, Actoplus Met® XR).

### Exemplary Methods of Use

[0234] Any of the anti-Gal3 antibodies or binding fragments thereof, or proteins, may be used in methods, as provided herein.

[0235] In some embodiments are disclosed methods of enhancing glucose transporter (GLUT) translocation in a cell. The methods comprise contacting the cell with an anti-Gal3 antibody or binding fragment thereof. In some embodiments, binding of the anti-Gal3 antibody or binding fragment thereof to Gal3 in the cell inhibits Gal3-mediated blocking of GLUT translocation. In some embodiments, the glucose transporter is glucose transporter 1 (GLUT1) and/or glucose transporter 4 (GLUT4). In some embodiments, the method is performed in vitro or in vivo. In some embodiments, GLUT translocation in the cell is enhanced by at least 50%, 55%, 60%, 65%, 70%, 75%, 80%, 85%, 90%, 95%, 100%, 105%, 110%, 115%, 120%, 125%, 130%, 135%, 140%, 145%, 150%, 155%, 160%, 165%, 170%, 175%, 180%, 185%, 190%, 195%, or 200% after contacting with the anti-Gal3 antibody or binding fragment thereof relative to a cell that is not contacted with the anti-Gal3 antibody or binding fragment thereof. In some embodiments, the anti-Gal3 antibody or binding fragment thereof selectively binds to an N-terminal domain of Gal3. In some embodiments, the anti-Gal3 antibody or binding fragment thereof binds to Peptide 1 (SEQ ID NO: 3), Peptide 6 (SEQ ID NO: 8), or Peptide 7 (SEQ ID NO:9), or any combination thereof. In some embodiments, the anti-Gal3 antibody or binding fragment thereof comprises (1) a heavy chain variable region comprising a V_{H}-CDR1, a V_{H}-CDR2, and a V_{H}-CDR3; and (2) a light chain variable region comprising a V_{L}-CDR1, a V_{L}-CDR2, and a V_{L}-CDR3. In some embodiments, the V_{H}-CDR1 comprises an amino acid sequence having at least 80%, 81%, 82%, 83%, 84%, 85%, 86%, 87%, 88%, 89%, 90%, 91%, 92%, 93%, 94%, 95%, 96%, 97%, 98%, 99%, or 100% identity to any one of the amino acid sequences of SEQ ID NOs: 27-70. In some embodiments, the V_{H}-CDR2 comprises an amino acid sequence having at least 80%, 81%, 82%, 83%, 84%, 85%, 86%, 87%, 88%, 89%, 90%, 91%, 92%, 93%, 94%, 95%, 96%, 97%, 98%, 99%, or 100% identity to any one of the amino acid sequences of SEQ ID NOs: 71-111, 801, 951, 952. In some embodiments, the V_{H}-CDR3 comprises an amino acid sequence having at least 80%, 81%, 82%, 83%, 84%, 85%, 86%, 87%, 88%, 89%, 90%, 91%, 92%, 93%, 94%, 95%, 96%, 97%, 98%, 99%, or 100% identity to any one of the amino acid sequences of SEQ ID NOs: 112-169, 802, 953, 954. In some embodiments, the V_{L}-CDR1 comprises an amino acid sequence having at least 80%, 81%, 82%, 83%, 84%, 85%, 86%, 87%, 88%, 89%, 90%, 91%, 92%, 93%, 94%, 95%, 96%, 97%, 98%, 99%, or 100% identity to any one of the amino acid sequences of SEQ ID NOs: 170-220. In some embodiments, the V_{L}-CDR2 comprises an amino acid sequence having at least 80%, 81%, 82%, 83%, 84%, 85%, 86%, 87%, 88%, 89%, 90%, 91%, 92%, 93%, 94%, 95%, 96%, 97%, 98%, 99%, or 100% identity to any one of the amino acid sequences of SEQ ID NOs: 221-247. In some embodiments, the V_{L}-CDR3 comprises an amino acid sequence having at least 80%, 81%, 82%, 83%, 84%, 85%, 86%, 87%, 88%, 89%, 90%, 91%, 92%, 93%, 94%, 95%, 96%, 97%, 98%, 99%, or 100% identity to any one of the amino acid sequences of SEQ ID NOs: 248-296. In some embodiments, the anti-Gal3 antibody or binding fragment thereof comprises a combination of the V_{H}-CDR1, V_{H}-CDR2, V_{H}-CDR3, V_{L}-CDR1, V_{L}-CDR2, and V_{L}-CDR3 as illustrated in FIG. 23. In some embodiments, the heavy chain variable region comprises a sequence having at least 80%, 81%, 82%, 83%, 84%, 85%, 86%, 87%, 88%, 89%, 90%, 91%, 92%, 93%, 94%, 95%, 96%, 97%, 98%, or 99% identity to the sequence selected from SEQ ID NOs: 297-373, 803, 806-820, 955-968, 1067-1109, 1415-1439. In some embodiments, the light chain variable region comprises a sequence having at least 80%, 81%, 82%, 83%, 84%, 85%, 86%, 87%, 88%, 89%, 90%, 91%, 92%, 93%, 94%, 95%, 96%, 97%, 98%, or 99% identity to the sequence selected from SEQ ID NOs: 374-447, 821-835, 941-943, 969-982, 1110-1152, 1440-1464. In some embodiments, the anti-Gal3 antibody or binding fragment thereof comprises a heavy chain, wherein the heavy chain comprises a sequence having at least 80%, 81%, 82%, 83%, 84%, 85%, 86%, 87%, 88%, 89%, 90%, 91%, 92%, 93%, 94%, 95%, 96%, 97%, 98%, or 99% identity to the sequence selected from SEQ ID NOs: 448-494, 804, 836-850, 983-996, 1153-1195, 1411, 1465-1489. In some embodiments, the anti-Gal3 antibody or binding fragment thereof comprises a light chain, wherein the light chain comprises a sequence having at least 80%, 81%, 82%, 83%, 84%, 85%, 86%, 87%, 88%, 89%, 90%, 91%, 92%, 93%, 94%, 95%, 96%, 97%, 98%, or 99% identity to the sequence selected from SEQ ID NOs: 495-538, 805, 851-865, 997-1010, 1196-1238, 1412, 1490-1514. In some embodiments, the anti-Gal3 antibody or binding fragment thereof is selected from the group consisting of: TB001, TB006, 12G5.D7, 13A12.2E5, 14H10.2C9, 15F10.2D6, 19B5.2E6, 20D11.2C6, 20H5.A3, 23H9.2E4, 2D10.2B2, 3B11.2G2, 7D8.2D8, mIMT001, 4A11.2B5, 4A11.H1L1, 4A11.H4L2, 4G2.2G6, 6B3.2D3, 6H6.2D6, 9H2.2H10, 13G4.2F8, 13H12.2F8, 15G7.2A7, 19D9.2E5, 23B10.2B12, 24D12.2H9, F846C.1B2, F846C.1F5, F846C.1H12, F846C.1H5, F846C.2H3, F846TC.14A2, F846TC.14E4, F846TC.16B5, F846TC.7F10, F847C.10B9, F847C.11B1, F847C.12F12, F847C.26F5, F847C.4B10, F849C.8D10, F849C.8H3, 846.2B11, 846.4D5, 846T.1H2, 847.14H4, 846.2D4, 846.2F11, 846T.10B1, 846T.2E3, 846T.4C9, 846T.4E11, 846T.4F5, 846T.8D1, 847.10C9, 847.11D6, 847.15D12, 847.15F9, 847.15H11, 847.20H7, 847.21B11, 847.27B9, 847.28D1, 847.2B8, 847.3B3, 849.1D2, 849.2D7, 849.2F12, 849.4B2, 849.4F12, 849.4F2, 849.5C2, 849.8D12, F847C.21H6, 849.5H1, 847.23F11, 847.16D10, 847.13E2-mH0mL1, 847.13E2-mH0mL2, 847.12C4, 847.4D3, 2D10-VH0-VL0, 2D10-hVH4-HVL1, 2D10-hVH4-HVL2, 2D10-hVH4-HVL3, 2D10-hVH4-HVL4, 2D10-hVH3-HVL1, 2D10-hVH3-HVL2, 2D10-hVH3-HVL3, 2D10-hVH3-HVL4, 20H5.A3-VH3VL1, 20H5.A3-VH3VL3, 20H5.A3-VH4VL1, 20H5.A3-VH5VL1, 20H5.A3-VH5VL3, 20H5.A3-VH6VL1, 20H5.A3-VH6VL3, 2D10.2B2-v2, 2D10-VH0-NDA-VL0, 2D10-VH0-QDT-VL0, 2D10-VH0-SDT-VL0, 2D10-VH0-v1-QDT, 2D10-VH0-v2-QDT, 2D10-hVH1-hVL1, 2D10-hVH1-hVL2, 2D10-hVH1-hVL3, 2D10-hVH1-hVL4, 2D10-hVH2-hVL1, 2D10-hVH2-hVL2, 2D10-hVH2-hVL3, 2D10-hVH2-hVL4, 20H5.A3-hIgG4(S228P), 20H5.A3-hIgG4(S228P)-mv2, 798-9.20H5.A3-mH0mL1, 798-9.20H5.A3-mH1mL0, 798-9.20H5.A3-mH1mL1, 798-9.20H5.A3-mH2mL0, 798-9.20H5.A3-mH2mL1, 20H5.A3-VH1VL1, 20H5.A3-VH1VL2, 20H5.A3-VH1VL3, 20H5.A3-VH1VL4, 20H5.A3-VH1VL5, 20H5.A3-VH1VL6, 20H5.A3-VH2VL3, 20H5.A3-VH2VL4, 20H5.A3-VH2VL5, 20H5.A3-VH2VL6, 20H5.A3-VH3VL5, 20H5.A3-VH3VL6, 20H5.A3-VH4VL3, 20H5.A3-VH4VL4, 20H5.A3-VH4VL5, 20H5.A3-VH4VL6, 20H5.A3-VH5VL5, 20H5.A3-VH5VL6, 20H5.A3-VH6VL4, 20H5.A3-VH6VL5, 20H5.A3-VH6VL6, 20H5.A3-VH7VL1, 20H5.A3-VH7VL2, 20H5.A3-VH7VL3, 20H5.A3-VH7VL4, 20H5.A3-VH7VL5, 20H5.A3-VH7VL6, 20H5.A3_hVH3VL1-hIgG1 (KEMv2), 20H5.A3_hVH3VL1-hIgG1 (LALAPGv2), 20H5.A3_hVH3VL1-hIgG1 (REM), 20H5.A3_hVH5VL1-hIgG1 (KEMv2), 20H5.A3_hVH5VL1-hIgG1 (LALAPGv2), 20H5.A3_hVH5VL1-hIgG1 (REM), 20H5.A3_hVH6VL1-hIgG1 (KEMv2), 20H5.A3_hVH6VL1-hIgG1 (LALAPGv2), 20H5.A3_hVH6VL1-hIgG1 (REM), 21H6-H0L0, 21H6-H1L1, 21H6-H1L2, 21H6-H1L3, 21H6-H1L4, 21H6-H2L1, 21H6-H2L2, 21H6-H2L3, 21H6-H2L4, 21H6-H3L1, 21H6-H3L2, 21H6-H3L3, 21H6-H3L4, 21H6-H4L1, 21H6-H4L2, 21H6-H4L3, 21H6-H4L4, 21H6-H5L1, 21H6-H5L2, 21H6-H5L3, 21H6-H5L4, 21H6-H6L1, 21H6-H6L2, 21H6-H6L3, 21H6-H6L4, or binding fragment thereof. In some embodiments, the anti-Gal3 antibody or binding fragment thereof is selected from the group consisting of: 20H5.A3, 20H5.A3-VH3VL1, 20H5.A3-VH3VL3, 20H5.A3-VH4VL1, 20H5.A3-VH5VL1, 20H5.A3-VH5VL3, 20H5.A3-VH6VL1, 20H5.A3-VH6VL3, or binding fragment thereof. In some embodiments, the anti-Gal3 antibody or binding fragment thereof is selected from the group consisting of: 2D10-VH0-VL0, 2D10-hVH4-HVL1, 2D10-hVH4-HVL2, 2D10-hVH4-HVL3, 2D10-hVH4-HVL4, 2D10-hVH3-HVL1, 2D10-hVH3-HVL2, 2D10-hVH3-HVL3, 2D10-hVH3-HVL4, or binding fragment thereof. In some embodiments, the anti-Gal3 antibody or binding fragment thereof is selected from the group consisting of: 21H6-H0L0, 21H6-H1L1, 21H6-H1L2, 21H6-H1L3, 21H6-H1L4, 21H6-H2L1, 21H6-H2L2, 21H6-H2L3, 21H6-H2L4, 21H6-H3L1, 21H6-H3L2, 21H6-H3L3, 21H6-H3L4, 21H6-H4L1, 21H6-H4L2, 21H6-H4L3, 21H6-H4L4, 21H6-H5L1, 21H6-H5L2, 21H6-H5L3, 21H6-H5L4, 21H6-H6L1, 21H6-H6L2, 21H6-H6L3, 21H6-H6L4, or binding fragment thereof.

[0236] In some embodiments are disclosed methods of enhancing glucose transporter (GLUT) translocation in a cell. The methods comprise contacting the cell with a preincubated complex of Gal3 and an anti-Gal3 antibody or binding fragment thereof. In some embodiments, the preincubated complex of Gal3 and the anti-Gal3 antibody or binding fragment thereof is prepared with Gal3 and the anti-Gal3 antibody or binding fragment thereof at a mass ratio of or of about 1:0.5, 1:0.6, 1:0.7, 1:0.8, 1:0.9, 1:1, 1:1.1, 1:1.2, 1:1.3, 1:1.4, 1:1.5, 1:1.6, 1:1.7, 1:1.8, 1:1.9, 1:2, 1:2.1, 1:2.2, 1:2.3, 1:2.4, or 1:2.5, or any mass ratio within a range defined by any two of the aforementioned mass ratios. In some embodiments, the preincubated complex of Gal3 and the anti-Gal3 antibody or binding fragment is prepared with Gal3 at a concentration of or of about 5, 6, 7, 8, 9, 10, 11, 12, 13, 14, 15, 16, 17, 18, 19, 20, 21, 22, 23, 24, 25, 26, 27, 28, 29, 30, 31, 32, 33, 34, 35, 36, 37, 38, 39, 40, 41, 42, 43, 44, 45, 46, 47, 48, 49, 50, 51, 52, 53, 54, 55, 56, 57, 58, 59, or 60 μg/mL, or any concentration within a range defined by any two of the aforementioned concentrations, and the anti-Gal3 antibody or binding fragment thereof at a concentration of or of about 20, 21, 22, 23, 24, 25, 26, 27, 28, 29, 30, 31, 32, 33, 34, 35, 36, 37, 38, 39, 40, 41, 42, 43, 44, 45, 46, 47, 48, 49, 50, 51, 52, 53, 54, 55, 56, 57, 58, 59, 60, 61, 62, 63, 64, 65, 66, 67, 68, 69, 70, 71, 72, 73, 74, 75, 76, 77, 78, 79, 80, 81, 82, 83, 84, 85, 86, 87, 88, 89, 90, 91, 92, 93, 94, 95, 96, 97, 98, 99, or 100 μg/mL, or any concentration within a range defined by any two of the aforementioned concentrations. In some embodiments, the glucose transporter is glucose transporter 1 (GLUT1) and/or glucose transporter 4 (GLUT4). In some embodiments, the method is performed in vitro or in vivo. In some embodiments, GLUT translocation in the cell is enhanced by at least 50%, 55%, 60%, 65%, 70%, 75%, 80%, 85%, 90%, 95%, 100%, 105%, 110%, 115%, 120%, 125%, 130%, 135%, 140%, 145%, 150%, 155%, 160%, 165%, 170%, 175%, 180%, 185%, 190%, 195%, or 200% after contacting with the preincubated complex of Gal3 and the anti-Gal3 antibody or binding fragment thereof relative to a cell that is not contacted with the preincubated complex of Gal3 and the anti-Gal3 antibody or binding fragment thereof. In some embodiments, the anti-Gal3 antibody or binding fragment thereof selectively binds to an N-terminal domain of Gal3. In some embodiments, the anti-Gal3 antibody or binding fragment thereof binds to Peptide 1 (SEQ ID NO: 3), Peptide 6 (SEQ ID NO: 8), or Peptide 7 (SEQ ID NO:9), or any combination thereof. In some embodiments, the anti-Gal3 antibody or binding fragment thereof comprises (1) a heavy chain variable region comprising a V_{H}-CDR1, a V_{H}-CDR2, and a V_{H}-CDR3; and (2) a light chain variable region comprising a V_{L}-CDR1, a V_{L}-CDR2, and a V_{L}-CDR3. In some embodiments, the V_{H}-CDR1 comprises an amino acid sequence having at least 80%, 81%, 82%, 83%, 84%, 85%, 86%, 87%, 88%, 89%, 90%, 91%, 92%, 93%, 94%, 95%, 96%, 97%, 98%, 99%, or 100% identity to any one of the amino acid sequences of SEQ ID NOs: 27-70. In some embodiments, the V_{H}-CDR2 comprises an amino acid sequence having at least 80%, 81%, 82%, 83%, 84%, 85%, 86%, 87%, 88%, 89%, 90%, 91%, 92%, 93%, 94%, 95%, 96%, 97%, 98%, 99%, or 100% identity to any one of the amino acid sequences of SEQ ID NOs: 71-111, 801, 951, 952. In some embodiments, the V_{H}-CDR3 comprises an amino acid sequence having at least 80%, 81%, 82%, 83%, 84%, 85%, 86%, 87%, 88%, 89%, 90%, 91%, 92%, 93%, 94%, 95%, 96%, 97%, 98%, 99%, or 100% identity to any one of the amino acid sequences of SEQ ID NOs: 112-169, 802, 953, 954. In some embodiments, the V_{L}-CDR1 comprises an amino acid sequence having at least 80%, 81%, 82%, 83%, 84%, 85%, 86%, 87%, 88%, 89%, 90%, 91%, 92%, 93%, 94%, 95%, 96%, 97%, 98%, 99%, or 100% identity to any one of the amino acid sequences of SEQ ID NOs: 170-220. In some embodiments, the V_{L}-CDR2 comprises an amino acid sequence having at least 80%, 81%, 82%, 83%, 84%, 85%, 86%, 87%, 88%, 89%, 90%, 91%, 92%, 93%, 94%, 95%, 96%, 97%, 98%, 99%, or 100% identity to any one of the amino acid sequences of SEQ ID NOs: 221-247. In some embodiments, the V_{L}-CDR3 comprises an amino acid sequence having at least 80%, 81%, 82%, 83%, 84%, 85%, 86%, 87%, 88%, 89%, 90%, 91%, 92%, 93%, 94%, 95%, 96%, 97%, 98%, 99%, or 100% identity to any one of the amino acid sequences of SEQ ID NOs: 248-296. In some embodiments, the anti-Gal3 antibody or binding fragment thereof comprises a combination of the V_{H}-CDR1, V_{H}-CDR2, V_{H}-CDR3, V_{L}-CDR1, V_{L}-CDR2, and V_{L}-CDR3 as illustrated in FIG. 23. In some embodiments, the heavy chain variable region comprises a sequence having at least 80%, 81%, 82%, 83%, 84%, 85%, 86%, 87%, 88%, 89%, 90%, 91%, 92%, 93%, 94%, 95%, 96%, 97%, 98%, or 99% identity to the sequence selected from SEQ ID NOs: 297-373, 803, 806-820, 955-968, 1067-1109, 1415-1439. In some embodiments, the light chain variable region comprises a sequence having at least 80%, 81%, 82%, 83%, 84%, 85%, 86%, 87%, 88%, 89%, 90%, 91%, 92%, 93%, 94%, 95%, 96%, 97%, 98%, or 99% identity to the sequence selected from SEQ ID NOs: 374-447, 821-835, 941-943, 969-982, 1110-1152, 1440-1464. In some embodiments, the anti-Gal3 antibody or binding fragment thereof comprises a heavy chain, wherein the heavy chain comprises a sequence having at least 80%, 81%, 82%, 83%, 84%, 85%, 86%, 87%, 88%, 89%, 90%, 91%, 92%, 93%, 94%, 95%, 96%, 97%, 98%, or 99% identity to the sequence selected from SEQ ID NOs: 448-494, 804, 836-850, 983-996, 1153-1195, 1411, 1465-1489. In some embodiments, the anti-Gal3 antibody or binding fragment thereof comprises a light chain, wherein the light chain comprises a sequence having at least 80%, 81%, 82%, 83%, 84%, 85%, 86%, 87%, 88%, 89%, 90%, 91%, 92%, 93%, 94%, 95%, 96%, 97%, 98%, or 99% identity to the sequence selected from SEQ ID NOs: 495-538, 805, 851-865, 997-1010, 1196-1238, 1412, 1490-1514. In some embodiments, the anti-Gal3 antibody or binding fragment thereof is selected from the group consisting of: TB001, TB006, 12G5.D7, 13A12.2E5, 14H10.2C9, 15F10.2D6, 19B5.2E6, 20D11.2C6, 20H5.A3, 23H9.2E4, 2D10.2B2, 3B11.2G2, 7D8.2D8, mIMT001, 4A11.2B5, 4A11.H1L1, 4A11.H4L2, 4G2.2G6, 6B3.2D3, 6H6.2D6, 9H2.2H10, 13G4.2F8, 13H12.2F8, 15G7.2A7, 19D9.2E5, 23B10.2B12, 24D12.2H9, F846C.1B2, F846C.1F5, F846C.1H12, F846C.1H5, F846C.2H3, F846TC.14A2, F846TC.14E4, F846TC.16B5, F846TC.7F10, F847C.10B9, F847C.11B1, F847C.12F12, F847C.26F5, F847C.4B10, F849C.8D10, F849C.8H3, 846.2B11, 846.4D5, 846T.1H2, 847.14H4, 846.2D4, 846.2F11, 846T.10B1, 846T.2E3, 846T.4C9, 846T.4E11, 846T.4F5, 846T.8D1, 847.10C9, 847.11D6, 847.15D12, 847.15F9, 847.15H11, 847.20H7, 847.21B11, 847.27B9, 847.28D1, 847.2B8, 847.3B3, 849.1D2, 849.2D7, 849.2F12, 849.4B2, 849.4F12, 849.4F2, 849.5C2, 849.8D12, F847C.21H6, 849.5H1, 847.23F11, 847.16D10, 847.13E2-mH0mL1, 847.13E2-mH0mL2, 847.12C4, 847.4D3, 2D10-VH0-VL0, 2D10-hVH4-HVL1, 2D10-hVH4-HVL2, 2D10-hVH4-HVL3, 2D10-hVH4-HVL4, 2D10-hVH3-HVL1, 2D10-hVH3-HVL2, 2D10-hVH3-HVL3, 2D10-hVH3-HVL4, 20H5.A3-VH3VL1, 20H5.A3-VH3VL3, 20H5.A3-VH4VL1, 20H5.A3-VH5VL1, 20H5.A3-VH5VL3, 20H5.A3-VH6VL1, 20H5.A3-VH6VL3, 2D10.2B2-v2, 2D10-VH0-NDA-VL0, 2D10-VH0-QDT-VL0, 2D10-VH0-SDT-VL0, 2D10-VH0-v1-QDT, 2D10-VH0-v2-QDT, 2D10-hVH1-hVL1, 2D10-hVH1-hVL2, 2D10-hVH1-hVL3, 2D10-hVH1-hVL4, 2D10-hVH2-hVL1, 2D10-hVH2-hVL2, 2D10-hVH2-hVL3, 2D10-hVH2-hVL4, 20H5.A3-hIgG4(S228P), 20H5.A3-hIgG4(S228P)-mv2, 798-9.20H5.A3-mH0mL1, 798-9.20H5.A3-mH1mL0, 798-9.20H5.A3-mH1mL1, 798-9.20H5.A3-mH2mL0, 798-9.20H5.A3-mH2mL1, 20H5.A3-VH1VL1, 20H5.A3-VH1VL2, 20H5.A3-VH1VL3, 20H5.A3-VH1VL4, 20H5.A3-VH1VL5, 20H5.A3-VH1VL6, 20H5.A3-VH2VL3, 20H5.A3-VH2VL4, 20H5.A3-VH2VL5, 20H5.A3-VH2VL6, 20H5.A3-VH3VL5, 20H5.A3-VH3VL6, 20H5.A3-VH4VL3, 20H5.A3-VH4VL4, 20H5.A3-VH4VL5, 20H5.A3-VH4VL6, 20H5.A3-VH5VL5, 20H5.A3-VH5VL6, 20H5.A3-VH6VL4, 20H5.A3-VH6VL5, 20H5.A3-VH6VL6, 20H5.A3-VH7VL1, 20H5.A3-VH7VL2, 20H5.A3-VH7VL3, 20H5.A3-VH7VL4, 20H5.A3-VH7VL5, 20H5.A3-VH7VL6, 20H5.A3_hVH3VL1-hIgG1 (KEMv2), 20H5.A3_hVH3VL1-hIgG1 (LALAPGv2), 20H5.A3_hVH3VL1-hIgG1 (REM), 20H5.A3_hVH5VL1-hIgG1 (KEMv2), 20H5.A3_hVH5VL1-hIgG1 (LALAPGv2), 20H5.A3_hVH5VL1-hIgG1 (REM), 20H5.A3_hVH6VL1-hIgG1 (KEMv2), 20H5.A3_hVH6VL1-hIgG1 (LALAPGv2), 20H5.A3_hVH6VL1-hIgG1 (REM), 21H6-H0L0, 21H6-H1L1, 21H6-H1L2, 21H6-H1L3, 21H6-H1L4, 21H6-H2L1, 21H6-H2L2, 21H6-H2L3, 21H6-H2L4, 21H6-H3L1, 21H6-H3L2, 21H6-H3L3, 21H6-H3L4, 21H6-H4L1, 21H6-H4L2, 21H6-H4L3, 21H6-H4L4, 21H6-H5L1, 21H6-H5L2, 21H6-H5L3, 21H6-H5L4, 21H6-H6L1, 21H6-H6L2, 21H6-H6L3, 21H6-H6L4, or binding fragment thereof. In some embodiments, the anti-Gal3 antibody or binding fragment thereof is selected from the group consisting of: 20H5.A3, 20H5.A3-VH3VL1, 20H5.A3-VH3VL3, 20H5.A3-VH4VL1, 20H5.A3-VH5VL1, 20H5.A3-VH5VL3, 20H5.A3-VH6VL1, 20H5.A3-VH6VL3, or binding fragment thereof. In some embodiments, the anti-Gal3 antibody or binding fragment thereof is selected from the group consisting of: 2D10-VH0-VL0, 2D10-hVH4-HVL1, 2D10-hVH4-HVL2, 2D10-hVH4-HVL3, 2D10-hVH4-HVL4, 2D10-hVH3-HVL1, 2D10-hVH3-HVL2, 2D10-hVH3-HVL3, 2D10-hVH3-HVL4, or binding fragment thereof. In some embodiments, the anti-Gal3 antibody or binding fragment thereof is selected from the group consisting of: 21H6-H0L0, 21H6-H1L1, 21H6-H1L2, 21H6-H1L3, 21H6-H1L4, 21H6-H2L1, 21H6-H2L2, 21H6-H2L3, 21H6-H2L4, 21H6-H3L1, 21H6-H3L2, 21H6-H3L3, 21H6-H3L4, 21H6-H4L1, 21H6-H4L2, 21H6-H4L3, 21H6-H4L4, 21H6-H5L1, 21H6-H5L2, 21H6-H5L3, 21H6-H5L4, 21H6-H6L1, 21H6-H6L2, 21H6-H6L3, 21H6-H6L4, or binding fragment thereof.

[0237] In some embodiments, antibodies that bind the N-terminal domain (NTD) of Gal3 (e.g. TB001, TB006, 2D10-VH0-VL0, 20H5.A3) can be used to reduce the ability of Gal3 to block GLUT (e.g., GLUT1 and/or GLUT4) translocation. In some embodiments, any antibody having 1-6 of the CDRs provided herein, that binds to the NTD, can be used in this manner or for this purpose. In some embodiments, reducing the ability of Gal3 to block GLUT (e.g., GLUT1 and/or GLUT4) translocation may be beneficial towards the treatment, amelioration, or prevention of a disease or disorder, such as insulin resistance syndrome, type 2 diabetes, chronic hyperinsulinemia, gestational diabetes, acanthosis nigricans, polycystic ovary syndrome, obesity, muscle wasting, cardiovascular diseases, cardiac hypertrophy, myocardial ischemia, pancreatic cancer associated diabetes, or cancer.

[0238] In some embodiments antibodies that bind to the carbohydrate recognition binding domain (CRD) of Gal3 (e.g. 13E2) can be used to enhance the ability of Gal3 to block GLUT (e.g., GLUT1 and/or GLUT4) translocation. In some embodiments, any antibody having 1-6 of the CDRs provided herein, that binds to the CRD, can be used in this manner or for this purpose. In some embodiments, enhancing the ability of Gal3 to block GLUT (e.g., GLUT1 and/or GLUT4) translocation may be beneficial towards the treatment, amelioration, or prevention of a disease or disorder, such as rhabdomyosarcoma.

[0239] Also disclosed herein are methods and uses directed to the treatment of a disease or disorder in a subject. In some embodiments, the methods and uses are directed to administering a protein to a subject having, suspected of having, or at risk of developing a disease or disorder. In some embodiments, the protein is an anti-Gal3 antibody or binding fragment thereof. In some embodiments, the disease or disorder is insulin resistance, a disease or disorder associated with insulin resistance, or a disease or disorder comprising a symptom of insulin resistance. In some embodiments, the method involves administering any antibody or variant thereof as provided herein (including any with one or more of the 6 CDRs provided in the present disclosure), in a therapeutically effective amount, sufficient to interfere with the interaction between GAL3 and GLUT (e.g., GLUT1 and/or GLUT4), so as to treat (either in response to a subject having and/or to reduce the risk of) one or more of: diabetes mellitus, insulin resistance, chronic hyperinsulinemia, dysmetabolic syndrome, type A insulin resistance syndrome, type B insulin resistance syndrome, gestational diabetes, acanthosis nigricans, polycystic ovary syndrome (PCOS), obesity, muscle wasting, cardiovascular diseases, cardiac hypertrophy, myocardial ischemia, hypertension, pancreatic cancer associated diabetes (PCDM), or cancers.

[0240] In some embodiments are methods of improving insulin sensitivity in a subject in need thereof. The methods comprise administering to the subject an anti-Gal3 antibody or binding fragment thereof. In some embodiments, binding of the anti-Gal3 antibody or binding fragment thereof to Gal3 in the subject inhibits Gal3-mediated blocking of GLUT translocation in the subject, thereby improving insulin sensitivity in the subject. In some embodiments, the GLUT is GLUT1 and/or GLUT4. In some embodiments, the methods further comprise identifying the subject as needing improvement in insulin sensitivity prior to the administering step. In some embodiments, the methods further comprise detecting an improvement in insulin sensitivity in the subject following the administering step. In some embodiments, detecting the improvement in insulin sensitivity in the subject is done by measuring blood sugar levels, measuring blood insulin levels, glucose tolerance testing, or hyperinsulinemic euglycemic clamp. In some embodiments, the insulin sensitivity in the subject is improved by at least 50%, 55%, 60%, 65%, 70%, 75%, 80%, 85%, 90%, 95%, 100%, 105%, 110%, 115%, 120%, 125%, 130%, 135%, 140%, 145%, 150%, 155%, 160%, 165%, 170%, 175%, 180%, 185%, 190%, 195%, or 200%, or any percentage within a range defined by any two of the aforementioned percentages, relative to the insulin sensitivity of the subject prior to the administering step. In some embodiments, the anti-Gal3 antibody or binding fragment thereof selectively binds to an N-terminal domain of Gal3. In some embodiments, the anti-Gal3 antibody or binding fragment thereof binds to Peptide 1 (SEQ ID NO: 3), Peptide 6 (SEQ ID NO: 8), or Peptide 7 (SEQ ID NO:9), or any combination thereof. In some embodiments, the anti-Gal3 antibody or binding fragment thereof comprises (1) a heavy chain variable region comprising a V_{H}-CDR1, a V_{H}-CDR2, and a V_{H}-CDR3; and (2) a light chain variable region comprising a V_{L}-CDR1, a V_{L}-CDR2, and a V_{L}-CDR3. In some embodiments, the V_{H}-CDR1 comprises an amino acid sequence having at least 80%, 81%, 82%, 83%, 84%, 85%, 86%, 87%, 88%, 89%, 90%, 91%, 92%, 93%, 94%, 95%, 96%, 97%, 98%, 99%, or 100% identity to any one of the amino acid sequences of SEQ ID NOs: 27-70. In some embodiments, the V_{H}-CDR2 comprises an amino acid sequence having at least 80%, 81%, 82%, 83%, 84%, 85%, 86%, 87%, 88%, 89%, 90%, 91%, 92%, 93%, 94%, 95%, 96%, 97%, 98%, 99%, or 100% identity to any one of the amino acid sequences of SEQ ID NOs: 71-111, 801, 951, 952. In some embodiments, the V_{H}-CDR3 comprises an amino acid sequence having at least 80%, 81%, 82%, 83%, 84%, 85%, 86%, 87%, 88%, 89%, 90%, 91%, 92%, 93%, 94%, 95%, 96%, 97%, 98%, 99%, or 100% identity to any one of the amino acid sequences of SEQ ID NOs: 112-169, 802, 953, 954. In some embodiments, the V_{L}-CDR1 comprises an amino acid sequence having at least 80%, 81%, 82%, 83%, 84%, 85%, 86%, 87%, 88%, 89%, 90%, 91%, 92%, 93%, 94%, 95%, 96%, 97%, 98%, 99%, or 100% identity to any one of the amino acid sequences of SEQ ID NOs: 170-220. In some embodiments, the V_{L}-CDR2 comprises an amino acid sequence having at least 80%, 81%, 82%, 83%, 84%, 85%, 86%, 87%, 88%, 89%, 90%, 91%, 92%, 93%, 94%, 95%, 96%, 97%, 98%, 99%, or 100% identity to any one of the amino acid sequences of SEQ ID NOs: 221-247. In some embodiments, the V_{L}-CDR3 comprises an amino acid sequence having at least 80%, 81%, 82%, 83%, 84%, 85%, 86%, 87%, 88%, 89%, 90%, 91%, 92%, 93%, 94%, 95%, 96%, 97%, 98%, 99%, or 100% identity to any one of the amino acid sequences of SEQ ID NOs: 248-296. In some embodiments, the anti-Gal3 antibody or binding fragment thereof comprises a combination of the V_{H}-CDR1, V_{H}-CDR2, V_{H}-CDR3, V_{L}-CDR1, V_{L}-CDR2, and V_{L}-CDR3 as illustrated in FIG. 23. In some embodiments, the heavy chain variable region comprises a sequence having at least 80%, 81%, 82%, 83%, 84%, 85%, 86%, 87%, 88%, 89%, 90%, 91%, 92%, 93%, 94%, 95%, 96%, 97%, 98%, or 99% identity to the sequence selected from SEQ ID NOs: 297-373, 803, 806-820, 955-968, 1067-1109, 1415-1439. In some embodiments, the light chain variable region comprises a sequence having at least 80%, 81%, 82%, 83%, 84%, 85%, 86%, 87%, 88%, 89%, 90%, 91%, 92%, 93%, 94%, 95%, 96%, 97%, 98%, or 99% identity to the sequence selected from SEQ ID NOs: 374-447, 821-835, 969-982, 1110-1152, 1440-1464. In some embodiments, the anti-Gal3 antibody or binding fragment thereof comprises a heavy chain, wherein the heavy chain comprises a sequence having at least 80%, 81%, 82%, 83%, 84%, 85%, 86%, 87%, 88%, 89%, 90%, 91%, 92%, 93%, 94%, 95%, 96%, 97%, 98%, or 99% identity to the sequence selected from SEQ ID NOs: 448-494, 804, 836-850, 983-996, 1153-1195, 1411, 1465-1489. In some embodiments, the anti-Gal3 antibody or binding fragment thereof comprises a light chain, wherein the light chain comprises a sequence having at least 80%, 81%, 82%, 83%, 84%, 85%, 86%, 87%, 88%, 89%, 90%, 91%, 92%, 93%, 94%, 95%, 96%, 97%, 98%, or 99% identity to the sequence selected from SEQ ID NOs: 495-538, 805, 851-865, 997-1010, 1196-1238, 1412, 1490-1514. In some embodiments, the anti-Gal3 antibody or binding fragment thereof is selected from the group consisting of: TB001, TB006, 12G5.D7, 13A12.2E5, 14H10.2C9, 15F10.2D6, 19B5.2E6, 20D11.2C6, 20H5.A3, 23H9.2E4, 2D10.2B2, 3B11.2G2, 7D8.2D8, mIMT001, 4A11.2B5, 4A11.H1L1, 4A11.H4L2, 4G2.2G6, 6B3.2D3, 6H6.2D6, 9H2.2H10, 13G4.2F8, 13H12.2F8, 15G7.2A7, 19D9.2E5, 23B10.2B12, 24D12.2H9, F846C.1B2, F846C.1F5, F846C.1H12, F846C.1H5, F846C.2H3, F846TC.14A2, F846TC.14E4, F846TC.16B5, F846TC.7F10, F847C.10B9, F847C.11B1, F847C.12F12, F847C.26F5, F847C.4B10, F849C.8D10, F849C.8H3, 846.2B11, 846.4D5, 846T.1H2, 847.14H4, 846.2D4, 846.2F11, 846T.10B1, 846T.2E3, 846T.4C9, 846T.4E11, 846T.4F5, 846T.8D1, 847.10C9, 847.11D6, 847.15D12, 847.15F9, 847.15H11, 847.20H7, 847.21B11, 847.27B9, 847.28D1, 847.2B8, 847.3B3, 849.1D2, 849.2D7, 849.2F12, 849.4B2, 849.4F12, 849.4F2, 849.5C2, 849.8D12, F847C.21H6, 849.5H1, 847.23F11, 847.16D10, 847.13E2-mH0mL1, 847.13E2-mH0mL2, 847.12C4, 847.4D3, 2D10-VH0-VL0, 2D10-hVH4-HVL1, 2D10-hVH4-HVL2, 2D10-hVH4-HVL3, 2D10-hVH4-HVL4, 2D10-hVH3-HVL1, 2D10-hVH3-HVL2, 2D10-hVH3-HVL3, 2D10-hVH3-HVL4, 20H5.A3-VH3VL1, 20H5.A3-VH3VL3, 20H5.A3-VH4VL1, 20H5.A3-VH5VL1, 20H5.A3-VH5VL3, 20H5.A3-VH6VL1, 20H5.A3-VH6VL3, 2D10.2B2-v2, 2D10-VH0-NDA-VL0, 2D10-VH0-QDT-VL0, 2D10-VH0-SDT-VL0, 2D10-VH0-v1-QDT, 2D10-VH0-v2-QDT, 2D10-hVH1-hVL1, 2D10-hVH1-hVL2, 2D10-hVH1-hVL3, 2D10-hVH1-hVL4, 2D10-hVH2-hVL1, 2D10-hVH2-hVL2, 2D10-hVH2-hVL3, 2D10-hVH2-hVL4, 20H5.A3-hIgG4(S228P), 20H5.A3-hIgG4(S228P)-mv2, 798-9.20H5.A3-mH0mL1, 798-9.20H5.A3-mH1mL0, 798-9.20H5.A3-mH1mL1, 798-9.20H5.A3-mH2mL0, 798-9.20H5.A3-mH2mL1, 20H5.A3-VH1VL1, 20H5.A3-VH1VL2, 20H5.A3-VH1VL3, 20H5.A3-VH1VL4, 20H5.A3-VH1VL5, 20H5.A3-VH1VL6, 20H5.A3-VH2VL3, 20H5.A3-VH2VL4, 20H5.A3-VH2VL5, 20H5.A3-VH2VL6, 20H5.A3-VH3VL5, 20H5.A3-VH3VL6, 20H5.A3-VH4VL3, 20H5.A3-VH4VL4, 20H5.A3-VH4VL5, 20H5.A3-VH4VL6, 20H5.A3-VH5VL5, 20H5.A3-VH5VL6, 20H5.A3-VH6VL4, 20H5.A3-VH6VL5, 20H5.A3-VH6VL6, 20H5.A3-VH7VL1, 20H5.A3-VH7VL2, 20H5.A3-VH7VL3, 20H5.A3-VH7VL4, 20H5.A3-VH7VL5, 20H5.A3-VH7VL6, 20H5.A3_hVH3VL1-hIgG1 (KEMv2), 20H5.A3_hVH3VL1-hIgG1 (LALAPGv2), 20H5.A3_hVH3VL1-hIgG1 (REM), 20H5.A3_hVH5VL1-hIgG1 (KEMv2), 20H5.A3_hVH5VL1-hIgG1 (LALAPGv2), 20H5.A3_hVH5VL1-hIgG1 (REM), 20H5.A3_hVH6VL1-hIgG1 (KEMv2), 20H5.A3_hVH6VL1-hIgG1 (LALAPGv2), 20H5.A3_hVH6VL1-hIgG1 (REM), 21H6-H0L0, 21H6-H1L1, 21H6-H1L2, 21H6-H1L3, 21H6-H1L4, 21H6-H2L1, 21H6-H2L2, 21H6-H2L3, 21H6-H2L4, 21H6-H3L1, 21H6-H3L2, 21H6-H3L3, 21H6-H3L4, 21H6-H4L1, 21H6-H4L2, 21H6-H4L3, 21H6-H4L4, 21H6-H5L1, 21H6-H5L2, 21H6-H5L3, 21H6-H5L4, 21H6-H6L1, 21H6-H6L2, 21H6-H6L3, 21H6-H6L4, or binding fragment thereof. In some embodiments, the anti-Gal3 antibody or binding fragment thereof is selected from the group consisting of: 20H5.A3, 20H5.A3-VH3VL1, 20H5.A3-VH3VL3, 20H5.A3-VH4VL1, 20H5.A3-VH5VL1, 20H5.A3-VH5VL3, 20H5.A3-VH6VL1, 20H5.A3-VH6VL3, or binding fragment thereof. In some embodiments, the anti-Gal3 antibody or binding fragment thereof is selected from the group consisting of: 2D10-VH0-VL0, 2D10-hVH4-HVL1, 2D10-hVH4-HVL2, 2D10-hVH4-HVL3, 2D10-hVH4-HVL4, 2D10-hVH3-HVL1, 2D10-hVH3-HVL2, 2D10-hVH3-HVL3, 2D10-hVH3-HVL4, or binding fragment thereof. In some embodiments, the anti-Gal3 antibody or binding fragment thereof is selected from the group consisting of: 21H6-H0L0, 21H6-H1L1, 21H6-H1L2, 21H6-H1L3, 21H6-H1L4, 21H6-H2L1, 21H6-H2L2, 21H6-H2L3, 21H6-H2L4, 21H6-H3L1, 21H6-H3L2, 21H6-H3L3, 21H6-H3L4, 21H6-H4L1, 21H6-H4L2, 21H6-H4L3, 21H6-H4L4, 21H6-H5L1, 21H6-H5L2, 21H6-H5L3, 21H6-H5L4, 21H6-H6L1, 21H6-H6L2, 21H6-H6L3, 21H6-H6L4, or binding fragment thereof.

[0241] In some embodiments are methods of improving insulin sensitivity in a subject in need thereof. The methods comprise administering to the subject a preincubated complex of Gal3 and an anti-Gal3 antibody or binding fragment thereof, thereby improving insulin sensitivity in the subject. In some embodiments, the preincubated complex of Gal3 and the anti-Gal3 antibody or binding fragment thereof is prepared with Gal3 and the anti-Gal3 antibody or binding fragment thereof at a mass ratio of or of about 1:0.5, 1:0.6, 1:0.7, 1:0.8, 1:0.9, 1:1, 1:1.1, 1:1.2, 1:1.3, 1:1.4, 1:1.5, 1:1.6, 1:1.7, 1:1.8, 1:1.9, 1:2, 1:2.1, 1:2.2, 1:2.3, 1:2.4, or 1:2.5, or any mass ratio within a range defined by any two of the aforementioned mass ratios. In some embodiments, the preincubated complex of Gal3 and the anti-Gal3 antibody or binding fragment is prepared with Gal3 at a concentration of or of about 5, 6, 7, 8, 9, 10, 11, 12, 13, 14, 15, 16, 17, 18, 19, 20, 21, 22, 23, 24, 25, 26, 27, 28, 29, 30, 31, 32, 33, 34, 35, 36, 37, 38, 39, 40, 41, 42, 43, 44, 45, 46, 47, 48, 49, 50, 51, 52, 53, 54, 55, 56, 57, 58, 59, or 60 μg/mL, or any concentration within a range defined by any two of the aforementioned concentrations, and the anti-Gal3 antibody or binding fragment thereof at a concentration of or of about 20, 21, 22, 23, 24, 25, 26, 27, 28, 29, 30, 31, 32, 33, 34, 35, 36, 37, 38, 39, 40, 41, 42, 43, 44, 45, 46, 47, 48, 49, 50, 51, 52, 53, 54, 55, 56, 57, 58, 59, 60, 61, 62, 63, 64, 65, 66, 67, 68, 69, 70, 71, 72, 73, 74, 75, 76, 77, 78, 79, 80, 81, 82, 83, 84, 85, 86, 87, 88, 89, 90, 91, 92, 93, 94, 95, 96, 97, 98, 99, or 100 μg/mL, or any concentration within a range defined by any two of the aforementioned concentrations. In some embodiments, the GLUT is GLUT1 and/or GLUT4. In some embodiments, the methods further comprise identifying the subject as needing improvement in insulin sensitivity prior to the administering step. In some embodiments, the methods further comprise detecting an improvement in insulin sensitivity in the subject following the administering step. In some embodiments, detecting the improvement in insulin sensitivity in the subject is done by measuring blood sugar levels, measuring blood insulin levels, glucose tolerance testing, or hyperinsulinemic euglycemic clamp. In some embodiments, the insulin sensitivity in the subject is improved by at least 50%, 55%, 60%, 65%, 70%, 75%, 80%, 85%, 90%, 95%, 100%, 105%, 110%, 115%, 120%, 125%, 130%, 135%, 140%, 145%, 150%, 155%, 160%, 165%, 170%, 175%, 180%, 185%, 190%, 195%, or 200%, or any percentage within a range defined by any two of the aforementioned percentages, relative to the insulin sensitivity of the subject prior to the administering step. In some embodiments, the anti-Gal3 antibody or binding fragment thereof selectively binds to an N-terminal domain of Gal3. In some embodiments, the anti-Gal3 antibody or binding fragment thereof binds to Peptide 1 (SEQ ID NO: 3), Peptide 6 (SEQ ID NO: 8), or Peptide 7 (SEQ ID NO:9), or any combination thereof. In some embodiments, the anti-Gal3 antibody or binding fragment thereof comprises (1) a heavy chain variable region comprising a V_{H}-CDR1, a V_{H}-CDR2, and a V_{H}-CDR3; and (2) a light chain variable region comprising a V_{L}-CDR1, a V_{L}-CDR2, and a V_{L}-CDR3. In some embodiments, the V_{H}-CDR1 comprises an amino acid sequence having at least 80%, 81%, 82%, 83%, 84%, 85%, 86%, 87%, 88%, 89%, 90%, 91%, 92%, 93%, 94%, 95%, 96%, 97%, 98%, 99%, or 100% identity to any one of the amino acid sequences of SEQ ID NOs: 27-70. In some embodiments, the V_{H}-CDR2 comprises an amino acid sequence having at least 80%, 81%, 82%, 83%, 84%, 85%, 86%, 87%, 88%, 89%, 90%, 91%, 92%, 93%, 94%, 95%, 96%, 97%, 98%, 99%, or 100% identity to any one of the amino acid sequences of SEQ ID NOs: 71-111, 801, 951, 952. In some embodiments, the V_{H}-CDR3 comprises an amino acid sequence having at least 80%, 81%, 82%, 83%, 84%, 85%, 86%, 87%, 88%, 89%, 90%, 91%, 92%, 93%, 94%, 95%, 96%, 97%, 98%, 99%, or 100% identity to any one of the amino acid sequences of SEQ ID NOs: 112-169, 802, 953, 954. In some embodiments, the V_{L}-CDR1 comprises an amino acid sequence having at least 80%, 81%, 82%, 83%, 84%, 85%, 86%, 87%, 88%, 89%, 90%, 91%, 92%, 93%, 94%, 95%, 96%, 97%, 98%, 99%, or 100% identity to any one of the amino acid sequences of SEQ ID NOs: 170-220. In some embodiments, the V_{L}-CDR2 comprises an amino acid sequence having at least 80%, 81%, 82%, 83%, 84%, 85%, 86%, 87%, 88%, 89%, 90%, 91%, 92%, 93%, 94%, 95%, 96%, 97%, 98%, 99%, or 100% identity to any one of the amino acid sequences of SEQ ID NOs: 221-247. In some embodiments, the V_{L}-CDR3 comprises an amino acid sequence having at least 80%, 81%, 82%, 83%, 84%, 85%, 86%, 87%, 88%, 89%, 90%, 91%, 92%, 93%, 94%, 95%, 96%, 97%, 98%, 99%, or 100% identity to any one of the amino acid sequences of SEQ ID NOs: 248-296. In some embodiments, the anti-Gal3 antibody or binding fragment thereof comprises a combination of the V_{H}-CDR1, V_{H}-CDR2, V_{H}-CDR3, V_{L}-CDR1, V_{L}-CDR2, and V_{L}-CDR3 as illustrated in FIG. 23. In some embodiments, the heavy chain variable region comprises a sequence having at least 80%, 81%, 82%, 83%, 84%, 85%, 86%, 87%, 88%, 89%, 90%, 91%, 92%, 93%, 94%, 95%, 96%, 97%, 98%, or 99% identity to the sequence selected from SEQ ID NOs: 297-373, 803, 806-820, 955-968, 1067-1109, 1415-1439. In some embodiments, the light chain variable region comprises a sequence having at least 80%, 81%, 82%, 83%, 84%, 85%, 86%, 87%, 88%, 89%, 90%, 91%, 92%, 93%, 94%, 95%, 96%, 97%, 98%, or 99% identity to the sequence selected from SEQ ID NOs: 374-447, 821-835, 969-982, 1110-1152, 1440-1464. In some embodiments, the anti-Gal3 antibody or binding fragment thereof comprises a heavy chain, wherein the heavy chain comprises a sequence having at least 80%, 81%, 82%, 83%, 84%, 85%, 86%, 87%, 88%, 89%, 90%, 91%, 92%, 93%, 94%, 95%, 96%, 97%, 98%, or 99% identity to the sequence selected from SEQ ID NOs: 448-494, 804, 836-850,983-996, 1153-1195, 1411, 1465-1489. In some embodiments, the anti-Gal3 antibody or binding fragment thereof comprises a light chain, wherein the light chain comprises a sequence having at least 80%, 81%, 82%, 83%, 84%, 85%, 86%, 87%, 88%, 89%, 90%, 91%, 92%, 93%, 94%, 95%, 96%, 97%, 98%, or 99% identity to the sequence selected from SEQ ID NOs: 495-538, 805, 851-865, 997-1010, 1196-1238, 1412, 1490-1514. In some embodiments, the anti-Gal3 antibody or binding fragment thereof is selected from the group consisting of: TB001, TB006, 12G5.D7, 13A12.2E5, 14H10.2C9, 15F10.2D6, 19B5.2E6, 20D11.2C6, 20H5.A3, 23H9.2E4, 2D10.2B2, 3B11.2G2, 7D8.2D8, mIMT001, 4A11.2B5, 4A11.H1L1, 4A11.H4L2, 4G2.2G6, 6B3.2D3, 6H6.2D6, 9H2.2H10, 13G4.2F8, 13H12.2F8, 15G7.2A7, 19D9.2E5, 23B10.2B12, 24D12.2H9, F846C.1B2, F846C.1F5, F846C.1H12, F846C.1H5, F846C.2H3, F846TC.14A2, F846TC.14E4, F846TC.16B5, F846TC.7F10, F847C.10B9, F847C.11B1, F847C.12F12, F847C.26F5, F847C.4B10, F849C.8D10, F849C.8H3, 846.2B11, 846.4D5, 846T.1H2, 847.14H4, 846.2D4, 846.2F11, 846T.10B1, 846T.2E3, 846T.4C9, 846T.4E11, 846T.4F5, 846T.8D1, 847.10C9, 847.11D6, 847.15D12, 847.15F9, 847.15H11, 847.20H7, 847.21B11, 847.27B9, 847.28D1, 847.2B8, 847.3B3, 849.1D2, 849.2D7, 849.2F12, 849.4B2, 849.4F12, 849.4F2, 849.5C2, 849.8D12, F847C.21H6, 849.5H1, 847.23F11, 847.16D10, 847.13E2-mH0mL1, 847.13E2-mH0mL2, 847.12C4, 847.4D3, 2D10-VH0-VL0, 2D10-hVH4-HVL1, 2D10-hVH4-HVL2, 2D10-hVH4-HVL3, 2D10-hVH4-HVL4, 2D10-hVH3-HVL1, 2D10-hVH3-HVL2, 2D10-hVH3-HVL3, 2D10-hVH3-HVL4, 20H5.A3-VH3VL1, 20H5.A3-VH3VL3, 20H5.A3-VH4VL1, 20H5.A3-VH5VL1, 20H5.A3-VH5VL3, 20H5.A3-VH6VL1, 20H5.A3-VH6VL3, 2D10.2B2-v2, 2D10-VH0-NDA-VL0, 2D10-VH0-QDT-VL0, 2D10-VH0-SDT-VL0, 2D10-VH0-v1-QDT, 2D10-VH0-v2-QDT, 2D10-hVH1-hVL1, 2D10-hVH1-hVL2, 2D10-hVH1-hVL3, 2D10-hVH1-hVL4, 2D10-hVH2-hVL1, 2D10-hVH2-hVL2, 2D10-hVH2-hVL3, 2D10-hVH2-hVL4, 20H5.A3-hIgG4(S228P), 20H5.A3-hIgG4(S228P)-mv2, 798-9.20H5.A3-mH0mL1, 798-9.20H5.A3-mH1mL0, 798-9.20H5.A3-mH1mL1, 798-9.20H5.A3-mH2mL0, 798-9.20H5.A3-mH2mL1, 20H5.A3-VH1VL1, 20H5.A3-VH1VL2, 20H5.A3-VH1VL3, 20H5.A3-VH1VL4, 20H5.A3-VH1VL5, 20H5.A3-VH1VL6, 20H5.A3-VH2VL3, 20H5.A3-VH2VL4, 20H5.A3-VH2VL5, 20H5.A3-VH2VL6, 20H5.A3-VH3VL5, 20H5.A3-VH3VL6, 20H5.A3-VH4VL3, 20H5.A3-VH4VL4, 20H5.A3-VH4VL5, 20H5.A3-VH4VL6, 20H5.A3-VH5VL5, 20H5.A3-VH5VL6, 20H5.A3-VH6VL4, 20H5.A3-VH6VL5, 20H5.A3-VH6VL6, 20H5.A3-VH7VL1, 20H5.A3-VH7VL2, 20H5.A3-VH7VL3, 20H5.A3-VH7VL4, 20H5.A3-VH7VL5, 20H5.A3-VH7VL6, 20H5.A3_hVH3VL1-hIgG1 (KEMv2), 20H5.A3_hVH3VL1-hIgG1 (LALAPGv2), 20H5.A3_hVH3VL1-hIgG1 (REM), 20H5.A3_hVH5VL1-hIgG1 (KEMv2), 20H5.A3_hVH5VL1-hIgG1 (LALAPGv2), 20H5.A3_hVH5VL1-hIgG1 (REM), 20H5.A3_hVH6VL1-hIgG1 (KEMv2), 20H5.A3_hVH6VL1-hIgG1 (LALAPGv2), 20H5.A3_hVH6VL1-hIgG1 (REM), 21H6-H0L0, 21H6-H1L1, 21H6-H1L2, 21H6-H1L3, 21H6-H1L4, 21H6-H2L1, 21H6-H2L2, 21H6-H2L3, 21H6-H2L4, 21H6-H3L1, 21H6-H3L2, 21H6-H3L3, 21H6-H3L4, 21H6-H4L1, 21H6-H4L2, 21H6-H4L3, 21H6-H4L4, 21H6-H5L1, 21H6-H5L2, 21H6-H5L3, 21H6-H5L4, 21H6-H6L1, 21H6-H6L2, 21H6-H6L3, 21H6-H6L4, or binding fragment thereof. In some embodiments, the anti-Gal3 antibody or binding fragment thereof is selected from the group consisting of: 20H5.A3, 20H5.A3-VH3VL1, 20H5.A3-VH3VL3, 20H5.A3-VH4VL1, 20H5.A3-VH5VL1, 20H5.A3-VH5VL3, 20H5.A3-VH6VL1, 20H5.A3-VH6VL3, or binding fragment thereof. In some embodiments, the anti-Gal3 antibody or binding fragment thereof is selected from the group consisting of: 2D10-VH0-VL0, 2D10-hVH4-HVL1, 2D10-hVH4-HVL2, 2D10-hVH4-HVL3, 2D10-hVH4-HVL4, 2D10-hVH3-HVL1, 2D10-hVH3-HVL2, 2D10-hVH3-HVL3, 2D10-hVH3-HVL4, or binding fragment thereof. In some embodiments, the anti-Gal3 antibody or binding fragment thereof is selected from the group consisting of: 21H6-H0L0, 21H6-H1L1, 21H6-H1L2, 21H6-H1L3, 21H6-H1L4, 21H6-H2L1, 21H6-H2L2, 21H6-H2L3, 21H6-H2L4, 21H6-H3L1, 21H6-H3L2, 21H6-H3L3, 21H6-H3L4, 21H6-H4L1, 21H6-H4L2, 21H6-H4L3, 21H6-H4L4, 21H6-H5L1, 21H6-H5L2, 21H6-H5L3, 21H6-H5L4, 21H6-H6L1, 21H6-H6L2, 21H6-H6L3, 21H6-H6L4, or binding fragment thereof.

[0242] In some embodiments are methods of treating a disease associated with insulin resistance in a subject in need thereof. In some embodiments, the methods comprise administering to the subject an anti-Gal3 antibody or binding fragment thereof, thereby treating the disease associated with insulin resistance in the subject. In some embodiments, the disease associated with insulin resistance comprises diabetes mellitus, chronic hyperinsulinemia, dysmetabolic syndrome, type A insulin resistance syndrome, type B insulin resistance syndrome, gestational diabetes, acanthosis nigricans, polycystic ovary syndrome (PCOS), obesity, muscle wasting, cardiovascular disease, cardiac hypertrophy, myocardial ischemia, hypertension, pancreatic cancer associated diabetes (PCDM) or cancer. In some embodiments, the methods further comprise identifying the subject as needing treatment of the disease associated with insulin resistance prior to the administering step. In some embodiments, the methods further comprise detecting an improvement in the disease associated with insulin resistance following the administering step. In some embodiments, detecting an improvement in the disease associated with insulin resistance comprises detecting an improvement in insulin sensitivity in the subject. In some embodiments, detecting the improvement in insulin sensitivity in the subject is done by measuring blood sugar levels, measuring blood insulin levels, glucose tolerance testing, or hyperinsulinemic euglycemic clamp. In some embodiments, the insulin sensitivity in the subject is improved by at least 50%, 55%, 60%, 65%, 70%, 75%, 80%, 85%, 90%, 95%, 100%, 105%, 110%, 115%, 120%, 125%, 130%, 135%, 140%, 145%, 150%, 155%, 160%, 165%, 170%, 175%, 180%, 185%, 190%, 195%, or 200%, or any percentage within a range defined by any two of the aforementioned percentages, relative to the insulin sensitivity of the subject prior to the administering step. In some embodiments, the anti-Gal3 antibody or binding fragment thereof selectively binds to an N-terminal domain of Gal3. In some embodiments, the anti-Gal3 antibody or binding fragment thereof binds to Peptide 1 (SEQ ID NO: 3), Peptide 6 (SEQ ID NO: 8), or Peptide 7 (SEQ ID NO:9), or any combination thereof. In some embodiments, the anti-Gal3 antibody or binding fragment thereof comprises (1) a heavy chain variable region comprising a V_{H}-CDR1, a V_{H}-CDR2, and a V_{H}-CDR3; and (2) a light chain variable region comprising a V_{L}-CDR1, a V_{L}-CDR2, and a V_{L}-CDR3. In some embodiments, the V_{H}-CDR1 comprises an amino acid sequence having at least 80%, 81%, 82%, 83%, 84%, 85%, 86%, 87%, 88%, 89%, 90%, 91%, 92%, 93%, 94%, 95%, 96%, 97%, 98%, 99%, or 100% identity to any one of the amino acid sequences of SEQ ID NOs: 27-70. In some embodiments, the V_{H}-CDR2 comprises an amino acid sequence having at least 80%, 81%, 82%, 83%, 84%, 85%, 86%, 87%, 88%, 89%, 90%, 91%, 92%, 93%, 94%, 95%, 96%, 97%, 98%, 99%, or 100% identity to any one of the amino acid sequences of SEQ ID NOs: 71-111, 801, 951, 952. In some embodiments, the V_{H}-CDR3 comprises an amino acid sequence having at least 80%, 81%, 82%, 83%, 84%, 85%, 86%, 87%, 88%, 89%, 90%, 91%, 92%, 93%, 94%, 95%, 96%, 97%, 98%, 99%, or 100% identity to any one of the amino acid sequences of SEQ ID NOs: 112-169, 802, 953, 954. In some embodiments, the V_{L}-CDR1 comprises an amino acid sequence having at least 80%, 81%, 82%, 83%, 84%, 85%, 86%, 87%, 88%, 89%, 90%, 91%, 92%, 93%, 94%, 95%, 96%, 97%, 98%, 99%, or 100% identity to any one of the amino acid sequences of SEQ ID NOs: 170-220. In some embodiments, the V_{L}-CDR2 comprises an amino acid sequence having at least 80%, 81%, 82%, 83%, 84%, 85%, 86%, 87%, 88%, 89%, 90%, 91%, 92%, 93%, 94%, 95%, 96%, 97%, 98%, 99%, or 100% identity to any one of the amino acid sequences of SEQ ID NOs: 221-247. In some embodiments, the V_{L}-CDR3 comprises an amino acid sequence having at least 80%, 81%, 82%, 83%, 84%, 85%, 86%, 87%, 88%, 89%, 90%, 91%, 92%, 93%, 94%, 95%, 96%, 97%, 98%, 99%, or 100% identity to any one of the amino acid sequences of SEQ ID NOs: 248-296. In some embodiments, the anti-Gal3 antibody or binding fragment thereof comprises a combination of the V_{H}-CDR1, V_{H}-CDR2, V_{H}-CDR3, V_{L}-CDR1, V_{L}-CDR2, and V_{L}-CDR3 as illustrated in FIG. 23. In some embodiments, the heavy chain variable region comprises a sequence having at least 80%, 81%, 82%, 83%, 84%, 85%, 86%, 87%, 88%, 89%, 90%, 91%, 92%, 93%, 94%, 95%, 96%, 97%, 98%, or 99% identity to the sequence selected from SEQ ID NOs: 297-373, 803, 806-820, 955-968, 1067-1109, 1415-1439. In some embodiments, the light chain variable region comprises a sequence having at least 80%, 81%, 82%, 83%, 84%, 85%, 86%, 87%, 88%, 89%, 90%, 91%, 92%, 93%, 94%, 95%, 96%, 97%, 98%, or 99% identity to the sequence selected from SEQ ID NOs: 374-447, 821-835, 941-943,969-982, 1110-1152, 1440-1464. In some embodiments, the anti-Gal3 antibody or binding fragment thereof comprises a heavy chain, wherein the heavy chain comprises a sequence having at least 80%, 81%, 82%, 83%, 84%, 85%, 86%, 87%, 88%, 89%, 90%, 91%, 92%, 93%, 94%, 95%, 96%, 97%, 98%, or 99% identity to the sequence selected from SEQ ID NOs: 448-494, 804, 836-850, 983-996, 1153-1195, 1411, 1465-1489. In some embodiments, the anti-Gal3 antibody or binding fragment thereof comprises a light chain, wherein the light chain comprises a sequence having at least 80%, 81%, 82%, 83%, 84%, 85%, 86%, 87%, 88%, 89%, 90%, 91%, 92%, 93%, 94%, 95%, 96%, 97%, 98%, or 99% identity to the sequence selected from SEQ ID NOs: 495-538, 805, 851-865, 997-1010, 1196-1238, 1412, 1490-1514. In some embodiments, the anti-Gal3 antibody or binding fragment thereof is selected from the group consisting of: TB001, TB006, 12G5.D7, 13A12.2E5, 14H10.2C9, 15F10.2D6, 19B5.2E6, 20D11.2C6, 20H5.A3, 23H9.2E4, 2D10.2B2, 3B11.2G2, 7D8.2D8, mIMT001, 4A11.2B5, 4A11.H1L1, 4A11.H4L2, 4G2.2G6, 6B3.2D3, 6H6.2D6, 9H2.2H10, 13G4.2F8, 13H12.2F8, 15G7.2A7, 19D9.2E5, 23B10.2B12, 24D12.2H9, F846C.1B2, F846C.1F5, F846C.1H12, F846C.1H5, F846C.2H3, F846TC.14A2, F846TC.14E4, F846TC.16B5, F846TC.7F10, F847C.10B9, F847C.11B1, F847C.12F12, F847C.26F5, F847C.4B10, F849C.8D10, F849C.8H3, 846.2B11, 846.4D5, 846T.1H2, 847.14H4, 846.2D4, 846.2F11, 846T.10B1, 846T.2E3, 846T.4C9, 846T.4E11, 846T.4F5, 846T.8D1, 847.10C9, 847.11D6, 847.15D12, 847.15F9, 847.15H11, 847.20H7, 847.21B11, 847.27B9, 847.28D1, 847.2B8, 847.3B3, 849.1D2, 849.2D7, 849.2F12, 849.4B2, 849.4F12, 849.4F2, 849.5C2, 849.8D12, F847C.21H6, 849.5H1, 847.23F11, 847.16D10, 847.13E2-mH0mL1, 847.13E2-mH0mL2, 847.12C4, 847.4D3, 2D10-VH0-VL0, 2D10-hVH4-HVL1, 2D10-hVH4-HVL2, 2D10-hVH4-HVL3, 2D10-hVH4-HVL4, 2D10-hVH3-HVL1, 2D10-hVH3-HVL2, 2D10-hVH3-HVL3, 2D10-hVH3-HVL4, 20H5.A3-VH3VL1, 20H5.A3-VH3VL3, 20H5.A3-VH4VL1, 20H5.A3-VH5VL1, 20H5.A3-VH5VL3, 20H5.A3-VH6VL1, 20H5.A3-VH6VL3, 2D10.2B2-v2, 2D10-VH0-NDA-VL0, 2D10-VH0-QDT-VL0, 2D10-VH0-SDT-VL0, 2D10-VH0-v1-QDT, 2D10-VH0-v2-QDT, 2D10-hVH1-hVL1, 2D10-hVH1-hVL2, 2D10-hVH1-hVL3, 2D10-hVH1-hVL4, 2D10-hVH2-hVL1, 2D10-hVH2-hVL2, 2D10-hVH2-hVL3, 2D10-hVH2-hVL4, 20H5.A3-hIgG4(S228P), 20H5.A3-hIgG4(S228P)-mv2, 798-9.20H5.A3-mH0mL1, 798-9.20H5.A3-mH1mL0, 798-9.20H5.A3-mH1mL1, 798-9.20H5.A3-mH2mL0, 798-9.20H5.A3-mH2mL1, 20H5.A3-VH1VL1, 20H5.A3-VH1VL2, 20H5.A3-VH1VL3, 20H5.A3-VH1VL4, 20H5.A3-VH1VL5, 20H5.A3-VH1VL6, 20H5.A3-VH2VL3, 20H5.A3-VH2VL4, 20H5.A3-VH2VL5, 20H5.A3-VH2VL6, 20H5.A3-VH3VL5, 20H5.A3-VH3VL6, 20H5.A3-VH4VL3, 20H5.A3-VH4VL4, 20H5.A3-VH4VL5, 20H5.A3-VH4VL6, 20H5.A3-VH5VL5, 20H5.A3-VH5VL6, 20H5.A3-VH6VL4, 20H5.A3-VH6VL5, 20H5.A3-VH6VL6, 20H5.A3-VH7VL1, 20H5.A3-VH7VL2, 20H5.A3-VH7VL3, 20H5.A3-VH7VL4, 20H5.A3-VH7VL5, 20H5.A3-VH7VL6, 20H5.A3_hVH3VL1-hIgG1 (KEMv2), 20H5.A3_hVH3VL1-hIgG1 (LALAPGv2), 20H5.A3_hVH3VL1-hIgG1 (REM), 20H5.A3_hVH5VL1-hIgG1 (KEMv2), 20H5.A3_hVH5VL1-hIgG1 (LALAPGv2), 20H5.A3_hVH5VL1-hIgG1 (REM), 20H5.A3_hVH6VL1-hIgG1 (KEMv2), 20H5.A3_hVH6VL1-hIgG1 (LALAPGv2), 20H5.A3_hVH6VL1-hIgG1 (REM), 21H6-H0L0, 21H6-H1L1, 21H6-H1L2, 21H6-H1L3, 21H6-H1L4, 21H6-H2L1, 21H6-H2L2, 21H6-H2L3, 21H6-H2L4, 21H6-H3L1, 21H6-H3L2, 21H6-H3L3, 21H6-H3L4, 21H6-H4L1, 21H6-H4L2, 21H6-H4L3, 21H6-H4L4, 21H6-H5L1, 21H6-H5L2, 21H6-H5L3, 21H6-H5L4, 21H6-H6L1, 21H6-H6L2, 21H6-H6L3, 21H6-H6L4, or binding fragment thereof. In some embodiments, the anti-Gal3 antibody or binding fragment thereof is selected from the group consisting of: 20H5.A3, 20H5.A3-VH3VL1, 20H5.A3-VH3VL3, 20H5.A3-VH4VL1, 20H5.A3-VH5VL1, 20H5.A3-VH5VL3, 20H5.A3-VH6VL1, 20H5.A3-VH6VL3, or binding fragment thereof. In some embodiments, the anti-Gal3 antibody or binding fragment thereof is selected from the group consisting of: 2D10-VH0-VL0, 2D10-hVH4-HVL1, 2D10-hVH4-HVL2, 2D10-hVH4-HVL3, 2D10-hVH4-HVL4, 2D10-hVH3-HVL1, 2D10-hVH3-HVL2, 2D10-hVH3-HVL3, 2D10-hVH3-HVL4, or binding fragment thereof. In some embodiments, the anti-Gal3 antibody or binding fragment thereof is selected from the group consisting of: 21H6-H0L0, 21H6-H1L1, 21H6-H1L2, 21H6-H1L3, 21H6-H1L4, 21H6-H2L1, 21H6-H2L2, 21H6-H2L3, 21H6-H2L4, 21H6-H3L1, 21H6-H3L2, 21H6-H3L3, 21H6-H3L4, 21H6-H4L1, 21H6-H4L2, 21H6-H4L3, 21H6-H4L4, 21H6-H5L1, 21H6-H5L2, 21H6-H5L3, 21H6-H5L4, 21H6-H6L1, 21H6-H6L2, 21H6-H6L3, 21H6-H6L4, or binding fragment thereof.

[0243] In some embodiments are methods of treating a disease associated with insulin resistance in a subject in need thereof. In some embodiments, the methods comprise administering to the subject a preincubated complex of Gal3 and an anti-Gal3 antibody or binding fragment thereof, thereby treating the disease associated with insulin resistance in the subject. In some embodiments, the preincubated complex of Gal3 and the anti-Gal3 antibody or binding fragment thereof is prepared with Gal3 and the anti-Gal3 antibody or binding fragment thereof at a mass ratio of or of about 1:0.5, 1:0.6, 1:0.7, 1:0.8, 1:0.9, 1:1, 1:1.1, 1:1.2, 1:1.3, 1:1.4, 1:1.5, 1:1.6, 1:1.7, 1:1.8, 1:1.9, 1:2, 1:2.1, 1:2.2, 1:2.3, 1:2.4, or 1:2.5, or any mass ratio within a range defined by any two of the aforementioned mass ratios. In some embodiments, the preincubated complex of Gal3 and the anti-Gal3 antibody or binding fragment is prepared with Gal3 at a concentration of or of about 5, 6, 7, 8, 9, 10, 11, 12, 13, 14, 15, 16, 17, 18, 19, 20, 21, 22, 23, 24, 25, 26, 27, 28, 29, 30, 31, 32, 33, 34, 35, 36, 37, 38, 39, 40, 41, 42, 43, 44, 45, 46, 47, 48, 49, 50, 51, 52, 53, 54, 55, 56, 57, 58, 59, or 60 μg/mL, or any concentration within a range defined by any two of the aforementioned concentrations, and the anti-Gal3 antibody or binding fragment thereof at a concentration of or of about 20, 21, 22, 23, 24, 25, 26, 27, 28, 29, 30, 31, 32, 33, 34, 35, 36, 37, 38, 39, 40, 41, 42, 43, 44, 45, 46, 47, 48, 49, 50, 51, 52, 53, 54, 55, 56, 57, 58, 59, 60, 61, 62, 63, 64, 65, 66, 67, 68, 69, 70, 71, 72, 73, 74, 75, 76, 77, 78, 79, 80, 81, 82, 83, 84, 85, 86, 87, 88, 89, 90, 91, 92, 93, 94, 95, 96, 97, 98, 99, or 100 μg/mL, or any concentration within a range defined by any two of the aforementioned concentrations. In some embodiments, the disease associated with insulin resistance comprises diabetes mellitus, chronic hyperinsulinemia, dysmetabolic syndrome, type A insulin resistance syndrome, type B insulin resistance syndrome, gestational diabetes, acanthosis nigricans, polycystic ovary syndrome (PCOS), obesity, muscle wasting, cardiovascular disease, cardiac hypertrophy, myocardial ischemia, hypertension, pancreatic cancer associated diabetes (PCDM) or cancer. In some embodiments, the methods further comprise identifying the subject as needing treatment of the disease associated with insulin resistance prior to the administering step. In some embodiments, the methods further comprise detecting an improvement in the disease associated with insulin resistance following the administering step. In some embodiments, detecting an improvement in the disease associated with insulin resistance comprises detecting an improvement in insulin sensitivity in the subject. In some embodiments, detecting the improvement in insulin sensitivity in the subject is done by measuring blood sugar levels, measuring blood insulin levels, glucose tolerance testing, or hyperinsulinemic euglycemic clamp. In some embodiments, the insulin sensitivity in the subject is improved by at least 50%, 55%, 60%, 65%, 70%, 75%, 80%, 85%, 90%, 95%, 100%, 105%, 110%, 115%, 120%, 125%, 130%, 135%, 140%, 145%, 150%, 155%, 160%, 165%, 170%, 175%, 180%, 185%, 190%, 195%, or 200%, or any percentage within a range defined by any two of the aforementioned percentages, relative to the insulin sensitivity of the subject prior to the administering step. In some embodiments, the anti-Gal3 antibody or binding fragment thereof selectively binds to an N-terminal domain of Gal3. In some embodiments, the anti-Gal3 antibody or binding fragment thereof binds to Peptide 1 (SEQ ID NO: 3), Peptide 6 (SEQ ID NO: 8), or Peptide 7 (SEQ ID NO:9), or any combination thereof. In some embodiments, the anti-Gal3 antibody or binding fragment thereof comprises (1) a heavy chain variable region comprising a V_{H}-CDR1, a V_{H}-CDR2, and a V_{H}-CDR3; and (2) a light chain variable region comprising a V_{L}-CDR1, a V_{L}-CDR2, and a V_{L}-CDR3. In some embodiments, the V_{H}-CDR1 comprises an amino acid sequence having at least 80%, 81%, 82%, 83%, 84%, 85%, 86%, 87%, 88%, 89%, 90%, 91%, 92%, 93%, 94%, 95%, 96%, 97%, 98%, 99%, or 100% identity to any one of the amino acid sequences of SEQ ID NOs: 27-70. In some embodiments, the V_{H}-CDR2 comprises an amino acid sequence having at least 80%, 81%, 82%, 83%, 84%, 85%, 86%, 87%, 88%, 89%, 90%, 91%, 92%, 93%, 94%, 95%, 96%, 97%, 98%, 99%, or 100% identity to any one of the amino acid sequences of SEQ ID NOs: 71-111, 801, 951, 952. In some embodiments, the V_{H}-CDR3 comprises an amino acid sequence having at least 80%, 81%, 82%, 83%, 84%, 85%, 86%, 87%, 88%, 89%, 90%, 91%, 92%, 93%, 94%, 95%, 96%, 97%, 98%, 99%, or 100% identity to any one of the amino acid sequences of SEQ ID NOs: 112-169, 802, 953, 954. In some embodiments, the V_{L}-CDR1 comprises an amino acid sequence having at least 80%, 81%, 82%, 83%, 84%, 85%, 86%, 87%, 88%, 89%, 90%, 91%, 92%, 93%, 94%, 95%, 96%, 97%, 98%, 99%, or 100% identity to any one of the amino acid sequences of SEQ ID NOs: 170-220. In some embodiments, the V_{L}-CDR2 comprises an amino acid sequence having at least 80%, 81%, 82%, 83%, 84%, 85%, 86%, 87%, 88%, 89%, 90%, 91%, 92%, 93%, 94%, 95%, 96%, 97%, 98%, 99%, or 100% identity to any one of the amino acid sequences of SEQ ID NOs: 221-247. In some embodiments, the V_{L}-CDR3 comprises an amino acid sequence having at least 80%, 81%, 82%, 83%, 84%, 85%, 86%, 87%, 88%, 89%, 90%, 91%, 92%, 93%, 94%, 95%, 96%, 97%, 98%, 99%, or 100% identity to any one of the amino acid sequences of SEQ ID NOs: 248-296. In some embodiments, the anti-Gal3 antibody or binding fragment thereof comprises a combination of the V_{H}-CDR1, V_{H}-CDR2, V_{H}-CDR3, V_{L}-CDR1, V_{L}-CDR2, and V_{L}-CDR3 as illustrated in FIG. 23. In some embodiments, the heavy chain variable region comprises a sequence having at least 80%, 81%, 82%, 83%, 84%, 85%, 86%, 87%, 88%, 89%, 90%, 91%, 92%, 93%, 94%, 95%, 96%, 97%, 98%, or 99% identity to the sequence selected from SEQ ID NOs: 297-373, 803, 806-820, 955-968, 1067-1109, 1415-1439. In some embodiments, the light chain variable region comprises a sequence having at least 80%, 81%, 82%, 83%, 84%, 85%, 86%, 87%, 88%, 89%, 90%, 91%, 92%, 93%, 94%, 95%, 96%, 97%, 98%, or 99% identity to the sequence selected from SEQ ID NOs: 374-447, 821-835, 941-943, 969-982, 1110-1152, 1440-1464. In some embodiments, the anti-Gal3 antibody or binding fragment thereof comprises a heavy chain, wherein the heavy chain comprises a sequence having at least 80%, 81%, 82%, 83%, 84%, 85%, 86%, 87%, 88%, 89%, 90%, 91%, 92%, 93%, 94%, 95%, 96%, 97%, 98%, or 99% identity to the sequence selected from SEQ ID NOs: 448-494, 804, 836-850, 983-996, 1153-1195, 1411, 1465-1489. In some embodiments, the anti-Gal3 antibody or binding fragment thereof comprises a light chain, wherein the light chain comprises a sequence having at least 80%, 81%, 82%, 83%, 84%, 85%, 86%, 87%, 88%, 89%, 90%, 91%, 92%, 93%, 94%, 95%, 96%, 97%, 98%, or 99% identity to the sequence selected from SEQ ID NOs: 495-538, 805, 851-865, 997-1010, 1196-1238, 1412, 1490-1514. In some embodiments, the anti-Gal3 antibody or binding fragment thereof is selected from the group consisting of: TB001, TB006, 12G5.D7, 13A12.2E5, 14H10.2C9, 15F10.2D6, 19B5.2E6, 20D11.2C6, 20H5.A3, 23H9.2E4, 2D10.2B2, 3B11.2G2, 7D8.2D8, mIMT001, 4A11.2B5, 4A11.H1L1, 4A11.H4L2, 4G2.2G6, 6B3.2D3, 6H6.2D6, 9H2.2H10, 13G4.2F8, 13H12.2F8, 15G7.2A7, 19D9.2E5, 23B10.2B12, 24D12.2H9, F846C.1B2, F846C.1F5, F846C.1H12, F846C.1H5, F846C.2H3, F846TC.14A2, F846TC.14E4, F846TC.16B5, F846TC.7F10, F847C.10B9, F847C.11B1, F847C.12F12, F847C.26F5, F847C.4B10, F849C.8D10, F849C.8H3, 846.2B11, 846.4D5, 846T.1H2, 847.14H4, 846.2D4, 846.2F11, 846T.10B1, 846T.2E3, 846T.4C9, 846T.4E11, 846T.4F5, 846T.8D1, 847.10C9, 847.11D6, 847.15D12, 847.15F9, 847.15H11, 847.20H7, 847.21B11, 847.27B9, 847.28D1, 847.2B8, 847.3B3, 849.1D2, 849.2D7, 849.2F12, 849.4B2, 849.4F12, 849.4F2, 849.5C2, 849.8D12, F847C.21H6, 849.5H1, 847.23F11, 847.16D10, 847.13E2-mH0mL1, 847.13E2-mH0mL2, 847.12C4, 847.4D3, 2D10-VH0-VL0, 2D10-hVH4-HVL1, 2D10-hVH4-HVL2, 2D10-hVH4-HVL3, 2D10-hVH4-HVL4, 2D10-hVH3-HVL1, 2D10-hVH3-HVL2, 2D10-hVH3-HVL3, 2D10-hVH3-HVL4, 20H5.A3-VH3VL1, 20H5.A3-VH3VL3, 20H5.A3-VH4VL1, 20H5.A3-VH5VL1, 20H5.A3-VH5VL3, 20H5.A3-VH6VL1, 20H5.A3-VH6VL3, 2D10.2B2-v2, 2D10-VH0-NDA-VL0, 2D10-VH0-QDT-VL0, 2D10-VH0-SDT-VL0, 2D10-VH0-v1-QDT, 2D10-VH0-v2-QDT, 2D10-hVH1-hVL1, 2D10-hVH1-hVL2, 2D10-hVH1-hVL3, 2D10-hVH1-hVL4, 2D10-hVH2-hVL1, 2D10-hVH2-hVL2, 2D10-hVH2-hVL3, 2D10-hVH2-hVL4, 20H5.A3-hIgG4(S228P), 20H5.A3-hIgG4(S228P)-mv2, 798-9.20H5.A3-mH0mL1, 798-9.20H5.A3-mH1mL0, 798-9.20H5.A3-mH1mL1, 798-9.20H5.A3-mH2mL0, 798-9.20H5.A3-mH2mL1, 20H5.A3-VH1VL1, 20H5.A3-VH1VL2, 20H5.A3-VH1VL3, 20H5.A3-VH1VL4, 20H5.A3-VH1VL5, 20H5.A3-VH1VL6, 20H5.A3-VH2VL3, 20H5.A3-VH2VL4, 20H5.A3-VH2VL5, 20H5.A3-VH2VL6, 20H5.A3-VH3VL5, 20H5.A3-VH3VL6, 20H5.A3-VH4VL3, 20H5.A3-VH4VL4, 20H5.A3-VH4VL5, 20H5.A3-VH4VL6, 20H5.A3-VH5VL5, 20H5.A3-VH5VL6, 20H5.A3-VH6VL4, 20H5.A3-VH6VL5, 20H5.A3-VH6VL6, 20H5.A3-VH7VL1, 20H5.A3-VH7VL2, 20H5.A3-VH7VL3, 20H5.A3-VH7VL4, 20H5.A3-VH7VL5, 20H5.A3-VH7VL6, 20H5.A3_hVH3VL1-hIgG1 (KEMv2), 20H5.A3_hVH3VL1-hIgG1 (LALAPGv2), 20H5.A3_hVH3VL1-hIgG1 (REM), 20H5.A3_hVH5VL1-hIgG1 (KEMv2), 20H5.A3_hVH5VL1-hIgG1 (LALAPGv2), 20H5.A3_hVH5VL1-hIgG1 (REM), 20H5.A3_hVH6VL1-hIgG1 (KEMv2), 20H5.A3_hVH6VL1-hIgG1 (LALAPGv2), 20H5.A3_hVH6VL1-hIgG1 (REM), 21H6-H0L0, 21H6-H1L1, 21H6-H1L2, 21H6-H1L3, 21H6-H1L4, 21H6-H2L1, 21H6-H2L2, 21H6-H2L3, 21H6-H2L4, 21H6-H3L1, 21H6-H3L2, 21H6-H3L3, 21H6-H3L4, 21H6-H4L1, 21H6-H4L2, 21H6-H4L3, 21H6-H4L4, 21H6-H5L1, 21H6-H5L2, 21H6-H5L3, 21H6-H5L4, 21H6-H6L1, 21H6-H6L2, 21H6-H6L3, 21H6-H6L4, or binding fragment thereof. In some embodiments, the anti-Gal3 antibody or binding fragment thereof is selected from the group consisting of: 20H5.A3, 20H5.A3-VH3VL1, 20H5.A3-VH3VL3, 20H5.A3-VH4VL1, 20H5.A3-VH5VL1, 20H5.A3-VH5VL3, 20H5.A3-VH6VL1, 20H5.A3-VH6VL3, or binding fragment thereof. In some embodiments, the anti-Gal3 antibody or binding fragment thereof is selected from the group consisting of: 2D10-VH0-VL0, 2D10-hVH4-HVL1, 2D10-hVH4-HVL2, 2D10-hVH4-HVL3, 2D10-hVH4-HVL4, 2D10-hVH3-HVL1, 2D10-hVH3-HVL2, 2D10-hVH3-HVL3, 2D10-hVH3-HVL4, or binding fragment thereof. In some embodiments, the anti-Gal3 antibody or binding fragment thereof is selected from the group consisting of: 21H6-H0L0, 21H6-H1L1, 21H6-H1L2, 21H6-H1L3, 21H6-H1L4, 21H6-H2L1, 21H6-H2L2, 21H6-H2L3, 21H6-H2L4, 21H6-H3L1, 21H6-H3L2, 21H6-H3L3, 21H6-H3L4, 21H6-H4L1, 21H6-H4L2, 21H6-H4L3, 21H6-H4L4, 21H6-H5L1, 21H6-H5L2, 21H6-H5L3, 21H6-H5L4, 21H6-H6L1, 21H6-H6L2, 21H6-H6L3, 21H6-H6L4, or binding fragment thereof.

[0244] In some embodiments are methods of diagnosing a disease or disorder, or a symptom thereof, in a subject. In some embodiments, the disease or disorder is associated with insulin resistance. In some embodiments, the disease or disorder is diabetes mellitus, chronic hyperinsulinemia, dysmetabolic syndrome, type A insulin resistance syndrome, type B insulin resistance syndrome, gestational diabetes, acanthosis nigricans, polycystic ovary syndrome (PCOS), obesity, muscle wasting, cardiovascular disease, cardiac hypertrophy, myocardial ischemia, hypertension, pancreatic cancer associated diabetes (PCDM) or cancer. In some embodiments, the disease or disorder is diabetes mellitus. In some embodiments, the disease or disorder is insulin-dependent diabetes mellitus. In some embodiments, the disease or disorder is insulin-independent diabetes mellitus. In some embodiments, the disease or disorder is Type I diabetes mellitus. In some embodiments, the disease or disorder is Type II diabetes mellitus. In some embodiments, the methods comprise contacting the subject, or a part of the subject (e.g. tissue, blood/serum) with an anti-Gal3 antibody or binding fragment thereof. In some embodiments, the anti-Gal3 antibody or binding fragment thereof is conjugated to a detectable moiety. In some embodiments, any of the methods disclosed herein involving an anti-Gal3 antibody or binding fragment can be performed with an antigen binding molecule that binds to Gal3.

[0245] As applied to any of the methods of use disclosed herein, in some embodiments, the anti-Gal3 antibody or binding fragment thereof binds to one or more peptides of SEQ ID NOs: 3-26. In some embodiments, the anti-Gal3 antibody or binding fragment thereof binds to an epitope present within a region of Gal3 defined by Peptide 1 (ADNFSLHDALSGSGNPNPQG; SEQ ID NO: 3), Peptide 4 (GAGGYPGASYPGAYPGQAPP; SEQ ID NO: 6), Peptide 6 (GAYPGQAPPGAYPGAPGAYP; SEQ ID NO: 8), Peptide 7 (AYPGAPGAYPGAPAPGVYPG; SEQ ID NO: 9), or a combination thereof. In some embodiments, any of the methods disclosed herein involving an anti-Gal3 antibody or binding fragment can be performed with an antigen binding molecule that binds to Gal3.

[0246] As applied to any of the methods of use disclosed herein, in some embodiments, the anti-Gal3 antibody or binding fragment thereof binds to an epitope of Gal3 that includes a motif of GxYPG, where x is the amino acids alanine (A), glycine (G), or valine (V). In some embodiments, an anti-Gal3 antibody as described herein binds to an epitope of Gal3 that includes two GxYPG motifs separated by three amino acids, where x is A, G, or V. In some embodiments, any of the methods disclosed herein involving an anti-Gal3 antibody or binding fragment can be performed with an antigen binding molecule that binds to Gal3.

[0247] As applied to any of the methods of use disclosed herein, in some embodiments, the anti-Gal3 antibody or binding fragment thereof comprises (1) a light chain variable region comprising a V_{L}-CDR1, a V_{L}-CDR2, and a V_{L}-CDR3 and (2) a heavy chain variable region comprising a V_{H}-CDR1, a V_{H}-CDR2, and a V_{H}-CDR3. In some embodiments, the V_{L}-CDR1 comprises an amino acid sequence having at least 60%, at least 70%, at least 80%, at least 90%, or 100% sequence identity to any amino acid sequence according to SEQ ID NOs: 170-220. In some embodiments, the V_{L}-CDR2 comprises an amino acid sequence having at least 60%, at least 70%, at least 80%, at least 90%, or 100% sequence identity to any amino acid sequence according to SEQ ID NOs: 221-247. In some embodiments, the V_{L}-CDR3 comprises an amino acid sequence having at least 60%, at least 70%, at least 80%, at least 90%, or 100% sequence identity to any amino acid sequence according to SEQ ID NOs: 248-296. In some embodiments, the V_{H}-CDR1 comprises an amino acid sequence having at least 60%, at least 70%, at least 80%, at least 90%, or 100% sequence identity to any amino acid sequence according to SEQ ID NOs: 27-70. In some embodiments, the V_{H}-CDR2 comprises an amino acid sequence having at least 60%, at least 70%, at least 80%, at least 90%, or 100% sequence identity to any amino acid sequence according to SEQ ID NOs: 71-111, 801, 951, 952. In some embodiments, the V_{H}-CDR3 comprises an amino acid sequence having at least 60%, at least 70%, at least 80%, at least 90%, or 100% sequence identity to any amino acid sequence according to SEQ ID NOs: 112-169, 802, 953, 954. In some embodiments, any of the methods disclosed herein involving an anti-Gal3 antibody or binding fragment can be performed with an antigen binding molecule that binds to Gal3.

[0248] As applied to any of the methods of use disclosed herein, in some embodiments, exemplary V_{H}-CDR1 sequences are depicted in FIG. 19A. In some embodiments, exemplary V_{H}-CDR2 sequences are depicted in FIG. 19B. In some embodiments, exemplary V_{H}-CDR3 sequences are depicted in FIG. 19C. In some embodiments, exemplary V_{L}-CDR1 sequences are depicted in FIG. 20A. In some embodiments, exemplary V_{L}-CDR2 sequences are depicted in FIG. 20B. In some embodiments, exemplary V_{L}-CDR3 sequences are depicted in FIG. 20C.

[0249] As applied to any of the methods of use disclosed herein, in some embodiments, the heavy chain variable region of any of the anti-Gal3 antibodies or binding fragments thereof disclosed herein comprises an amino acid sequence having at least 75%, 80%, 85%, 90%, 95%, or 100% sequence identity to any sequence according to SEQ ID NOs: 297-373, 803, 806-820, 955-968, 1067-1109, 1415-1439. In some embodiments, the heavy chain variable region of any of the anti-Gal3 antibodies or binding fragments thereof disclosed herein is selected from the group consisting of SEQ ID NOs: 297-373, 803, 806-820, 955-968, 1067-1109, 1415-1439. In some embodiments, exemplary V_{H} are depicted in FIG. 21. In some embodiments, any of the methods disclosed herein involving an anti-Gal3 antibody or binding fragment can be performed with an antigen binding molecule that binds to Gal3.

[0250] As applied to any of the methods of use disclosed herein, in some embodiments, the light chain variable region of any of the anti-Gal3 antibodies or binding fragments thereof disclosed herein comprises an amino acid sequence having at least 75%, 80%, 85%, 90%, 95%, or 100% sequence identity to any sequence according to SEQ ID NOs: 374-447, 821-835, 941-943, 969-982, 1110-1152, 1440-1464. In some embodiments, the light chain variable region of any of the anti-Gal3 antibodies or binding fragments thereof disclosed herein is selected from the group consisting of SEQ ID NOs: 374-447, 821-835, 941-943, 969-982, 1110-1152, 1440-1464. In some embodiments, exemplary V_{L} are depicted in FIG. 22. In some embodiments, any of the methods disclosed herein involving an anti-Gal3 antibody or binding fragment can be performed with an antigen binding molecule that binds to Gal3.

[0251] As applied to any of the methods of use disclosed herein, in some embodiments, the anti-Gal3 antibody or binding fragment thereof comprises the heavy chain sequence of any one of SEQ ID NOs: 448-494, 804, 836-850, 983-996, 1153-1195, 1411, 1465-1489. In some embodiments, the anti-Gal3 antibody or binding fragment thereof comprises the light chain sequence of any one of SEQ ID NOs: 495-538, 805, 851-865, 997-1010,1196-1238, 1412, 1490-1514.

[0252] As applied to any of the methods of use disclosed herein, in some embodiments, the anti-Gal3 antibody or binding fragment thereof is selected from the group consisting of TB001, TB006, 12G5.D7, 13A12.2E5, 14H10.2C9, 15F10.2D6, 19B5.2E6, 20D11.2C6, 20H5.A3, 23H9.2E4, 2D10.2B2, 3B11.2G2, 7D8.2D8, mIMT001, 4A11.2B5, 4A11.H1L1, 4A11.H4L2, 4G2.2G6, 6B3.2D3, 6H6.2D6, 9H2.2H10, 13G4.2F8, 13H12.2F8, 15G7.2A7, 19D9.2E5, 23B10.2B12, 24D12.2H9, F846C.1B2, F846C.1F5, F846C.1H12, F846C.1H5, F846C.2H3, F846TC.14A2, F846TC.14E4, F846TC.16B5, F846TC.7F10, F847C.10B9, F847C.11B1, F847C.12F12, F847C.26F5, F847C.4B10, F849C.8D10, F849C.8H3, 846.2B11, 846.4D5, 846T.1H2, 847.14H4, 846.2D4, 846.2F11, 846T.10B1, 846T.2E3, 846T.4C9, 846T.4E11, 846T.4F5, 846T.8D1, 847.10C9, 847.11D6, 847.15D12, 847.15F9, 847.15H11, 847.20H7, 847.21B11, 847.27B9, 847.28D1, 847.2B8, 847.3B3, 849.1D2, 849.2D7, 849.2F12, 849.4B2, 849.4F12, 849.4F2, 849.5C2, 849.8D12, F847C.21H6, 849.5H1, 847.23F11, 847.16D10, 847.13E2-mH0mL1, 847.13E2-mH0mL2, 847.12C4, 847.4D3, 2D10-VH0-VL0, 2D10-hVH4-HVL1, 2D10-hVH4-HVL2, 2D10-hVH4-HVL3, 2D10-hVH4-HVL4, 2D10-hVH3-HVL1, 2D10-hVH3-HVL2, 2D10-hVH3-HVL3, 2D10-hVH3-HVL4, 20H5.A3-VH3VL1, 20H5.A3-VH3VL3, 20H5.A3-VH4VL1, 20H5.A3-VH5VL1, 20H5.A3-VH5VL3, 20H5.A3-VH6VL1, 20H5.A3-VH6VL3, 2D10.2B2-v2, 2D10-VH0-NDA-VL0, 2D10-VH0-QDT-VL0, 2D10-VH0-SDT-VL0, 2D10-VH0-v1-QDT, 2D10-VH0-v2-QDT, 2D10-hVH1-hVL1, 2D10-hVH1-hVL2, 2D10-hVH1-hVL3, 2D10-hVH1-hVL4, 2D10-hVH2-hVL1, 2D10-hVH2-hVL2, 2D10-hVH2-hVL3, 2D10-hVH2-hVL4, 20H5.A3-hIgG4(S228P), 20H5.A3-hIgG4(S228P)-mv2, 798-9.20H5.A3-mH0mL1, 798-9.20H5.A3-mH1mL0, 798-9.20H5.A3-mH1mL1, 798-9.20H5.A3-mH2mL0, 798-9.20H5.A3-mH2mL1, 20H5.A3-VH1VL1, 20H5.A3-VH1VL2, 20H5.A3-VH1VL3, 20H5.A3-VH1VL4, 20H5.A3-VH1VL5, 20H5.A3-VH1VL6, 20H5.A3-VH2VL3, 20H5.A3-VH2VL4, 20H5.A3-VH2VL5, 20H5.A3-VH2VL6, 20H5.A3-VH3VL5, 20H5.A3-VH3VL6, 20H5.A3-VH4VL3, 20H5.A3-VH4VL4, 20H5.A3-VH4VL5, 20H5.A3-VH4VL6, 20H5.A3-VH5VL5, 20H5.A3-VH5VL6, 20H5.A3-VH6VL4, 20H5.A3-VH6VL5, 20H5.A3-VH6VL6, 20H5.A3-VH7VL1, 20H5.A3-VH7VL2, 20H5.A3-VH7VL3, 20H5.A3-VH7VL4, 20H5.A3-VH7VL5, 20H5.A3-VH7VL6, 20H5.A3_hVH3VL1-hIgG1 (KEMv2), 20H5.A3_hVH3VL1-hIgG1 (LALAPGv2), 20H5.A3_hVH3VL1-hIgG1 (REM), 20H5.A3_hVH5VL1-hIgG1 (KEMv2), 20H5.A3_hVH5VL1-hIgG1 (LALAPGv2), 20H5.A3_hVH5VL1-hIgG1 (REM), 20H5.A3_hVH6VL1-hIgG1 (KEMv2), 20H5.A3_hVH6VL1-hIgG1 (LALAPGv2), 20H5.A3_hVH6VL1-hIgG1 (REM), 21H6-H0L0, 21H6-H1L1, 21H6-H1L2, 21H6-H1L3, 21H6-H1L4, 21H6-H2L1, 21H6-H2L2, 21H6-H2L3, 21H6-H2L4, 21H6-H3L1, 21H6-H3L2, 21H6-H3L3, 21H6-H3L4, 21H6-H4L1, 21H6-H4L2, 21H6-H4L3, 21H6-H4L4, 21H6-H5L1, 21H6-H5L2, 21H6-H5L3, 21H6-H5L4, 21H6-H6L1, 21H6-H6L2, 21H6-H6L3, 21H6-H6L4, or binding fragment thereof.

[0253] As applied to any of the methods of use disclosed herein, in some embodiments, the anti-Gal3 antibody or binding fragment thereof excludes the subset of named anti-Gal3 antibodies or binding fragments thereof depicted in any one of FIGS. 38A-D. In some embodiments, CDRs (including heavy chain and light chain CDRs), heavy chain variable regions, light chain variable regions, heavy chains, and/or light chains are excluded from the sequences associated with the subset of named anti-Gal3 antibodies or binding fragments thereof depicted in any one of FIGS. 38A-D. In some embodiments, combinations of CDRs (including heavy chain and light chain CDRs), heavy chain variable regions, light chain variable regions, heavy chains, and/or light chains are excluded from the sequences associated with the subset of named anti-Gal3 antibodies or binding fragments thereof depicted in any one of FIGS. 38A-D, or excludes any one or more of the CDRs, VH, VL, HC, and/or LC thereof. In some embodiments, the anti-Gal3 antibody or binding fragment thereof excludes those selected from the group of named anti-Gal3 antibody or binding fragment thereof depicted in FIG. 38A, or excludes any one or more of the CDRs, VH, VL, HC, and/or LC thereof. In some embodiments, the anti-Gal3 antibody or binding fragment thereof excludes those selected from the group of named anti-Gal3 antibody or binding fragment thereof depicted in FIG. 38B, or excludes any one or more of the CDRs, VH, VL, HC, and/or LC thereof. In some embodiments, the anti-Gal3 antibody or binding fragment thereof excludes those selected from the group of named anti-Gal3 antibody or binding fragment thereof depicted in FIG. 38C, or excludes any one or more of the CDRs, VH, VL, HC, and/or LC thereof. In some embodiments, the anti-Gal3 antibody or binding fragment thereof excludes those selected from the group of named anti-Gal3 antibody or binding fragment thereof depicted in FIG. 38D, or excludes any one or more of the CDRs, VH, VL, HC, and/or LC thereof. In some embodiments, the anti-Gal3 antibody or binding fragment thereof blocks the interaction between Gal3 and GLUT (e.g., GLUT1 and/or GLUT4) and excludes those selected from the group of named anti-Gal3 antibody or binding fragment thereof depicted in FIG. 38A, or excludes any one or more of the CDRs, VH, VL, HC, and/or LC thereof. In some embodiments, the anti-Gal3 antibody or binding fragment thereof blocks the interaction between Gal3 and GLUT (e.g., GLUT1 and/or GLUT4) and excludes those selected from the group of named anti-Gal3 antibody or binding fragment thereof depicted in FIG. 38B, or excludes any one or more of the CDRs, VH, VL, HC, and/or LC thereof. In some embodiments, the anti-Gal3 antibody or binding fragment thereof blocks the interaction between Gal3 and GLUT (e.g., GLUT1 and/or GLUT4) and excludes those selected from the group of named anti-Gal3 antibody or binding fragment thereof depicted in FIG. 38C, or excludes any one or more of the CDRs, VH, VL, HC, and/or LC thereof. In some embodiments, the anti-Gal3 antibody or binding fragment thereof blocks the interaction between Gal3 and GLUT (e.g., GLUT1 and/or GLUT4) and excludes those selected from the group of named anti-Gal3 antibody or binding fragment thereof depicted in FIG. 38D, or excludes any one or more of the CDRs, VH, VL, HC, and/or LC thereof. In other embodiments, any of these constructs (e.g., those in FIG. 38A-38D) are used for any of the methods provided herein.

[0254] As applied to any of the methods of use disclosed herein, in some embodiments, the anti-Gal3 antibody or binding fragment thereof is selected from the subset of named anti-Gal3 antibodies or binding fragments thereof depicted in any one of FIGS. 39A-E. In some embodiments, CDRs (including heavy chain and light chain CDRs), heavy chain variable regions, light chain variable regions, heavy chains, and/or light chains are selected from the sequences associated with the subset of named anti-Gal3 antibodies or binding fragments thereof depicted in any one of FIGS. 39A-E. In some embodiments, combinations of CDRs (including heavy chain and light chain CDRs), heavy chain variable regions, light chain variable regions, heavy chains, and/or light chains are selected from the sequences associated with the subset of named anti-Gal3 antibodies or binding fragments thereof depicted in any one of FIGS. 39A-E. In some embodiments, the anti-Gal3 antibody or binding fragment thereof is selected from the group of named anti-Gal3 antibody or binding fragment thereof depicted in FIG. 39A, or comprises any one or more of the CDRs, VH, VL, HC, and/or LC thereof. In some embodiments, the anti-Gal3 antibody or binding fragment thereof is selected from the group of named anti-Gal3 antibody or binding fragment thereof depicted in FIG. 39B, or comprises any one or more of the CDRs, VH, VL, HC, and/or LC thereof. In some embodiments, the anti-Gal3 antibody or binding fragment thereof is selected from the group of named anti-Gal3 antibody or binding fragment thereof depicted in FIG. 39C, or comprises any one or more of the CDRs, VH, VL, HC, and/or LC thereof. In some embodiments, the anti-Gal3 antibody or binding fragment thereof is selected from the group of named anti-Gal3 antibody or binding fragment thereof depicted in FIG. 39D, or comprises any one or more of the CDRs, VH, VL, HC, and/or LC thereof. In some embodiments, the anti-Gal3 antibody or binding fragment thereof is selected from the group of named anti-Gal3 antibody or binding fragment thereof depicted in FIG. 39E, or comprises any one or more of the CDRs, VH, VL, HC, and/or LC thereof.

[0255] As applied to any of the methods of use disclosed herein, in some embodiments, the anti-Gal3 antibody or binding fragment inhibits, blocks, or disrupts an interaction between Gal3 and a glucose transporter (e.g., GLUT1 and/or GLUT4). In some embodiments, the anti-Gal3 antibody or binding fragment inhibits, blocks, or disrupts the interaction with a quantifiable IC50. In some embodiments, the anti-Gal3 antibody or binding fragments inhibits, blocks, or disrupts the interaction between Gal3 and the glucose transporter (e.g., GLUT1 and/or GLUT4) with an IC50 of 0.1, 0.2, 0.3, 0.4, 0.5, 0.6, 0.7, 0.8, 0.9, 1.0, 1.1, 1.2, 1.3, 1.4, 1.5, 1.6, 1.7, 1.8, 1.9, or 2.0 μg/mL, or no more than 0.1, 0.2, 0.3, 0.4, 0.5, 0.6, 0.7, 0.8, 0.9, 1.0, 1.1, 1.2, 1.3, 1.4, 1.5, 1.6, 1.7, 1.8, 1.9, or 2.0 μg/mL, or any IC50 concentration within a range defined by any two of the aforementioned concentrations.

[0256] As applied to any of the methods of use disclosed herein, in some embodiments, the anti-Gal3 antibody or binding fragment thereof comprises a payload. In some embodiments, the payload is conjugated to the anti-Gal3 antibody or binding fragment thereof. In some embodiments, the payload is a cytotoxic payload, microtubule disrupting agent, DNA modifying agent, Akt inhibitor, polymerase inhibitor, detectable moiety, immunomodulatory agent, immune modulator, immunotoxin, nucleic acid polymer, aptamer, peptide, or any combination thereof. In some embodiments, the payload is a detectable moiety. In some embodiments, any of the methods disclosed herein involving an anti-Gal3 antibody or binding fragment can be performed with an antigen binding molecule that binds to Gal3.

[0257] As applied to any of the methods of use disclosed herein, in some embodiments, the anti-Gal3 antibody or binding fragment thereof is or comprises a humanized antibody. In some embodiments, the anti-Gal3 antibody or binding fragment thereof is or comprises a full-length antibody or a binding fragment thereof. In some embodiments, the anti-Gal3 antibody or binding fragment thereof is or comprises a bispecific antibody or a binding fragment thereof. In some embodiments, the anti-Gal3-antibody or binding fragment thereof is or comprises a monovalent Fab′, a divalent Fab2, a single-chain variable fragment (scFv), a diabody, a minibody, a nanobody, a single-domain antibody (sdAb), or a camelid antibody, or binding fragment thereof. In some embodiments, the anti-Gal3 antibody or binding fragment thereof is or comprises an IgG framework. In some embodiments, the anti-Gal3 antibody or binding fragment thereof is or comprises an IgG1, IgG2, or IgG4 framework. In some embodiments, any of the methods disclosed herein involving an anti-Gal3 antibody or binding fragment can be performed with an antigen binding molecule that binds to Gal3.

[0258] As applied to any of the methods of treatment disclosed herein, in some embodiments, in some embodiments, the anti-Gal3 antibody or binding fragment thereof is administered enterally, orally, intranasally, parenterally, intracranially, subcutaneously, intramuscularly, intradermally, or intravenously, or any combination thereof.

[0259] As applied to any of the methods of treatment disclosed herein, in some embodiments, the anti-Gal3 antibody or binding fragment thereof is formulated for systemic administration. In some embodiments, the anti-Gal3 antibody or binding fragment thereof is formulated for parenteral administration. In some embodiments, more than one anti-Gal3 antibody or binding fragment is administered. In some embodiments, when more than one anti-Gal3 antibody or binding fragment is administered, the more than one anti-Gal3 antibodies or binding fragments thereof may be selected from the anti-Gal3 antibodies or binding fragments thereof disclosed herein. In some embodiments, any of the methods disclosed herein involving an anti-Gal3 antibody or binding fragment can be performed with an antigen binding molecule that binds to Gal3.

[0260] As applied to any of the methods of use or treatment disclosed herein, the subject is a mammal. In some embodiments, the mammal is a human, cat, dog, mouse, rat, hamster, rodent, pig, cow, horse, sheep, or goat. In some embodiments, the mammal is a human.

### Therapeutic Regimens

[0261] In some embodiments, the anti-Gal3 antibodies or binding fragments thereof disclosed herein are administered for therapeutic applications. In some embodiments, the anti-Gal3 antibody or binding fragment thereof is administered once per day, twice per day, three times per day or more. The anti-Gal3 antibody or binding fragment thereof is administered daily, every day, every alternate day, five days a week, once a week, every other week, two weeks per month, three weeks per month, once a month, twice a month, three times per month, or more. In some embodiments, the anti-Gal3 antibody or binding fragment thereof is administered for at least 1 month, 2 months, 3 months, 4 months, 5 months, 6 months, 7 months, 8 months, 9 months, 10 months, 11 months, 12 months, 18 months, 2 years, 3 years, or more.

[0262] In the case wherein the patient's status does improve, upon the doctor's discretion the administration of the anti-Gal3 antibody or binding fragment thereof is given continuously; alternatively, the dose of the anti-Gal3 antibody or binding fragment thereof being administered is temporarily reduced or temporarily suspended for a certain length of time (i.e., a “drug holiday”). In some instances, the length of the drug holiday varies between 2 days and 1 year, including by way of example only, 2 days, 3 days, 4 days, 5 days, 6 days, 7 days, 10 days, 12 days, 15 days, 20 days, 28 days, 35 days, 50 days, 70 days, 100 days, 120 days, 150 days, 180 days, 200 days, 250 days, 280 days, 300 days, 320 days, 350 days, or 365 days. The dose reduction during a drug holiday is from 10%-100%, including, by way of example only, 10%, 15%, 20%, 25%, 30%, 35%, 40%, 45%, 50%, 55%, 60%, 65%, 70%, 75%, 80%, 85%, 90%, 95%, or 100%.

[0263] Once improvement of the patient's condition has occurred, a maintenance dose is administered if necessary. Subsequently, the dosage or the frequency of administration, or both, can be reduced, as a function of the symptoms, to a level at which the treated disease, disorder, or condition is retained.

[0264] In some embodiments, the amount of a given agent that correspond to such an amount varies depending upon factors such as the particular compound, the severity of the disease, the identity (e.g., weight) of the subject or host in need of treatment, but nevertheless is routinely determined in a manner known in the art according to the particular circumstances surrounding the case, including, e.g., the specific agent being administered, the route of administration, and the subject or host being treated. In some instances, the desired dose is conveniently presented in a single dose or as divided doses administered simultaneously (or over a short period of time) or at appropriate intervals, for example as two, three, four or more sub-doses per day.

[0265] The foregoing ranges are merely suggestive, as the number of variables in regard to an individual treatment regime is large, and considerable excursions from these recommended values are not uncommon. Such dosages are altered depending on a number of variables, not limited to the activity of the compound used, the disease or condition to be treated, the mode of administration, the requirements of the individual subject, the severity of the disease or condition being treated, and the judgment of the practitioner.

[0266] In some embodiments, toxicity and therapeutic efficacy of such therapeutic regimens are determined by standard pharmaceutical procedures in cell cultures or experimental animals, including, but not limited to, the determination of the LD50 (the dose lethal to 50% of the population) and the ED50 (the dose therapeutically effective in 50% of the population). The dose ratio between the toxic and therapeutic effects is the therapeutic index and it is expressed as the ratio between LD50 and ED50. Compounds exhibiting high therapeutic indices are preferred. The data obtained from cell culture assays and animal studies are used in formulating a range of dosage for use in human. The dosage of such compounds lies preferably within a range of circulating concentrations that include the ED50 with minimal toxicity. The dosage varies within this range depending upon the dosage form employed and the route of administration utilized.

### Polynucleotides and Vectors

[0267] In some embodiments, the present disclosure provides isolated nucleic acids encoding any of the anti-Gal3 antibodies or binding fragments thereof disclosed herein. In another embodiment, the present disclosure provides vectors comprising a nucleic acid sequence encoding any anti-Gal3 antibody or binding fragment thereof disclosed herein. In some embodiments, this disclosure provides isolated nucleic acids that encode heavy chain variable regions, light chain variable regions, heavy chains, or light chains of an anti-Gal3 antibody or binding fragment thereof disclosed herein.

[0268] In some embodiments, nucleic acid sequences encoding for heavy chain variable regions are depicted in FIG. 33 (SEQ ID NOs: 539-620, 797, 866-880, 1011-1024, 1239-1281, 1515-1539). In some embodiments, nucleic acid sequences encoding for light chain variable regions are depicted in FIG. 34 (SEQ ID NOs: 621-702, 798, 881-895, 1025-1038, 1282-1324, 1540-1564). In some embodiments, nucleic acid sequences encoding for heavy chains are depicted in FIG. 35 (SEQ ID NO: 703-749, 799, 896-910, 1039-1052, 1325-1367, 1565-1589). In some embodiments, nucleic acid sequences encoding for light chains are depicted in FIG. 36 (SEQ ID NO: 750-796, 800, 911-925, 1053-1066, 1368-1410, 1590-1614).

[0269] Any one of the anti-Gal3 antibodies or binding fragments thereof described herein can be prepared by recombinant DNA technology, synthetic chemistry techniques, or a combination thereof. For instance, sequences encoding the desired components of the anti-Gal3 antibodies, including light chain CDRs and heavy chain CDRs are typically assembled cloned into an expression vector using standard molecular techniques know in the art. These sequences may be assembled from other vectors encoding the desired protein sequence, from PCR-generated fragments using respective template nucleic acids, or by assembly of synthetic oligonucleotides encoding the desired sequences. Expression systems can be created by transfecting a suitable cell with an expressing vector which comprises an anti-Gal3 antibody of interest or binding fragment thereof.

[0270] Nucleotide sequences corresponding to various regions of light or heavy chains of an existing antibody can be readily obtained and sequenced using convention techniques including but not limited to hybridization, PCR, and DNA sequencing. Hybridoma cells that produce monoclonal antibodies serve as a preferred source of antibody nucleotide sequences. A vast number of hybridoma cells producing an array of monoclonal antibodies may be obtained from public or private repositories. The largest depository agent is American Type Culture Collection, which offers a diverse collection of well-characterized hybridoma cell lines. Alternatively, antibody nucleotides can be obtained from immunized or non-immunized rodents or humans, and form organs such as spleen and peripheral blood lymphocytes. Specific techniques applicable for extracting and synthesizing antibody nucleotides are described in Orlandi et al. (1989) Proc. Natl. Acad. Sci. U.S.A. 86: 3833-3837; Larrick et al. (1989) Biochem. Biophys. Res. Commun. 160:1250-1255; Sastry et al. (1989) Proc. Natl. Acad. Sci., U.S.A. 86: 5728-5732; and U.S. Pat. No. 5,969,108.

[0271] Polynucleotides encoding anti-Gal3 antibodies or binding fragments thereof can also be modified, for example, by substituting the coding sequence for human heavy and light chain constant regions in place of the homologous non-human sequences. In that manner, chimeric antibodies are prepared that retain the binding specificity of the original anti-Gal3 antibody or binding fragment thereof.

[0272] Also disclosed herein are methods of producing an anti-Gal3 antibody or binding fragment thereof. In some embodiments, the methods comprise expressing a nucleic acid that encodes for the anti-Gal3 antibody or binding fragment thereof in a cell and isolating the expressed anti-Gal3 antibody or binding fragment thereof from the cell. In some embodiments, the methods further comprise concentrating the anti-Gal3 antibody or binding fragment thereof to a desired concentration. In some embodiments, the cell is a mammalian cell, insect cell, or bacterial cell. In some embodiments, the anti-Gal3 antibody or binding fragment thereof is any one of the anti-Gal3 antibodies or binding fragments disclosed herein. Specific procedures of expressing antibodies in a cell and isolation of the expressed antibodies are conventionally known and can be practiced by one skilled in the art.

### Antibody Production

[0273] In some cases, anti-Gal3 antibodies or binding fragments thereof are raised by standard protocol by injecting a production animal with an antigenic composition. See, e.g., Harlow and Lane, Antibodies: A Laboratory Manual, Cold Spring Harbor Laboratory, 1988. When utilizing an entire protein, or a larger section of the protein, antibodies may be raised by immunizing the production animal with the protein and a suitable adjuvant (e.g., Freund's, Freund's complete, oil-in-water emulsions, etc.). When a smaller peptide is utilized, it is advantageous to conjugate the peptide with a larger molecule to make an immunostimulatory conjugate. Commonly utilized conjugate proteins that are commercially available for such use include bovine serum albumin (BSA) and keyhole limpet hemocyanin (KLH). In order to raise antibodies to particular epitopes, peptides derived from the full sequence may be utilized. Alternatively, in order to generate antibodies to relatively short peptide portions of the protein target, a superior immune response may be elicited if the polypeptide is joined to a carrier protein, such as ovalbumin, BSA or KLH.

[0274] Polyclonal or monoclonal anti-Gal3 antibodies or binding fragments thereof can be produced from animals which have been genetically altered to produce human immunoglobulins. A transgenic animal can be produced by initially producing a “knock-out” animal which does not produce the animal's natural antibodies, and stably transforming the animal with a human antibody locus (e.g., by the use of a human artificial chromosome). In such cases, only human antibodies are then made by the animal. Techniques for generating such animals, and deriving antibodies therefrom, are described in U.S. Pat. Nos. 6,162,963 and 6,150,584, each incorporated fully herein by reference in its entirety. Such antibodies can be referred to as human xenogenic antibodies.

[0275] Alternatively, anti-Gal3 antibodies or binding fragments thereof can be produced from phage libraries containing human variable regions. See U.S. Pat. No. 6,174,708, incorporated fully herein by reference in its entirety.

[0276] In some aspects of any of the embodiments disclosed herein, an anti-Gal3 antibody or binding fragment thereof is produced by a hybridoma.

[0277] For monoclonal anti-Gal3 antibodies, hybridomas may be formed by isolating the stimulated immune cells, such as those from the spleen of the inoculated animal. These cells can then be fused to immortalized cells, such as myeloma cells or transformed cells, which are capable of replicating indefinitely in cell culture, thereby producing an immortal, immunoglobulin-secreting cell line. The immortal cell line utilized can be selected to be deficient in enzymes necessary for the utilization of certain nutrients. Many such cell lines (such as myelomas) are known to those skilled in the art, and include, for example: thymidine kinase (TK) or hypoxanthine-guanine phosphoriboxyl transferase (HGPRT). These deficiencies allow selection for fused cells according to their ability to grow on, for example, hypoxanthine aminopterinthymidine medium (HAT).

[0278] In addition, the anti-Gal3 antibody or binding fragment thereof may be produced by genetic engineering.

[0279] Anti-Gal3 antibodies or binding fragments thereof disclosed herein can have a reduced propensity to induce an undesired immune response in humans, for example, anaphylactic shock, and can also exhibit a reduced propensity for priming an immune response which would prevent repeated dosage with an antibody therapeutic or imaging agent (e.g., the human-anti-murine-antibody “HAMA” response). Such anti-Gal3 antibodies or binding fragments thereof include, but are not limited to, humanized, chimeric, or xenogenic human anti-Gal3 antibodies or binding fragments thereof.

[0280] Chimeric anti-Gal3 antibodies or binding fragments thereof can be made, for example, by recombinant means by combining the murine variable light and heavy chain regions (VK and VH), obtained from a murine (or other animal-derived) hybridoma clone, with the human constant light and heavy chain regions, in order to produce an antibody with predominantly human domains. The production of such chimeric antibodies is well known in the art and may be achieved by standard means (as described, e.g., in U.S. Pat. No. 5,624,659, incorporated fully herein by reference).

[0281] The term “humanized” as applies to a non-human (e.g. rodent or primate) antibodies are hybrid immunoglobulins, immunoglobulin chains or fragments thereof which contain minimal sequence derived from non-human immunoglobulin. For the most part, humanized antibodies are human immunoglobulins (recipient antibody) in which residues from a complementary determining region (CDR) of the recipient are replaced by residues from a CDR of a non-human species (donor antibody) such as mouse, rat, rabbit or primate having the desired specificity, affinity and capacity. In some instances, Fv framework region (FR) residues of the human immunoglobulin are replaced by corresponding non-human residues. Furthermore, the humanized antibody may comprise residues which are found neither in the recipient antibody nor in the imported CDR or framework sequences. These modifications are made to further refine and optimize antibody performance and minimize immunogenicity when introduced into a human body. In some examples, the humanized antibody will comprise substantially all of at least one, and typically two, variable domains, in which all or substantially all of the CDR regions correspond to those of a non-human immunoglobulin and all or substantially all of the FR regions are those of a human immunoglobulin sequence. The humanized antibody may also comprise at least a portion of an immunoglobulin constant region (Fc), typically that of a human immunoglobulin.

[0282] Humanized antibodies can be engineered to contain human-like immunoglobulin domains and incorporate only the complementarity-determining regions of the animal-derived antibody. This can be accomplished by carefully examining the sequence of the hyper-variable loops of the variable regions of a monoclonal antigen binding unit or monoclonal antibody and fitting them to the structure of a human antigen binding unit or human antibody chains. See, e.g., U.S. Pat. No. 6,187,287, incorporated fully herein by reference.

[0283] Methods for humanizing non-human antibodies are well known in the art. “Humanized” antibodies are antibodies in which at least part of the sequence has been altered from its initial form to render it more like human immunoglobulins. In some versions, the heavy (H) chain and light (L) chain constant (C) regions are replaced with human sequence. This can be a fusion polypeptide comprising a variable (V) region and a heterologous immunoglobulin C region. In some versions, the complementarity determining regions (CDRs) comprise non-human antibody sequences, while the V framework regions have also been converted to human sequences. See, for example, EP 0329400. In some versions, V regions are humanized by designing consensus sequences of human and mouse V regions and converting residues outside the CDRs that are different between the consensus sequences.

[0284] In principle, a framework sequence from a humanized antibody can serve as the template for CDR grafting; however, it has been demonstrated that straight CDR replacement into such a framework can lead to significant loss of binding affinity to the antigen. Glaser et al. (1992) J. Immunol. 149:2606; Tempest et al. (1992) Biotechnology 9:266; and Shalaby et al. (1992) J. Exp. Med. 17:217. The more homologous a human antibody (HuAb) is to the original murine antibody (muAb), the less likely that the human framework will introduce distortions into the murine CDRs that could reduce affinity. Based on a sequence homology search against an antibody sequence database, the HuAb IC4 provides good framework homology to muM4TS.22, although other highly homologous HuAbs would be suitable as well, especially kappa L chains from human subgroup I or H chains from human subgroup III. Kabat et al. (1987). Various computer programs such as ENCAD (Levitt et al. (1983) J. Mol. Biol. 168:595) are available to predict the ideal sequence for the V region. The disclosure thus encompasses HuAbs with different variable (V) regions. It is within the skill of one in the art to determine suitable V region sequences and to optimize these sequences. Methods for obtaining antibodies with reduced immunogenicity are also described in U.S. Pat. No. 5,270,202 and EP 699,755, each hereby incorporated by reference in its entirety.

[0285] Humanized antibodies can be prepared by a process of analysis of the parental sequences and various conceptual humanized products using three dimensional models of the parental and humanized sequences. Three-dimensional immunoglobulin models are familiar to those skilled in the art. Computer programs are available which illustrate and display probable three-dimensional conformational structures of selected candidate immunoglobulin sequences. Inspection of these displays permits analysis of the likely role of the residues in the functioning of the candidate immunoglobulin sequence, i.e., the analysis of residues that influence the ability of the candidate immunoglobulin to bind its antigen. In this way, FR residues can be selected and combined from the consensus and import sequence so that the desired antibody characteristic, such as increased affinity for the target antigen(s), is achieved.

[0286] A process for humanization of subject antigen binding units can be as follows. The best-fit germline acceptor heavy and light chain variable regions are selected based on homology, canonical structure and physical properties of the human antibody germlines for grafting. Computer modeling of mVH/VL versus grafted hVH/VL is performed and prototype humanized antibody sequence is generated. If modeling indicated a need for framework back-mutations, second variant with indicated FW changes is generated. DNA fragments encoding the selected germline frameworks and murine CDRs are synthesized. The synthesized DNA fragments are subcloned into IgG expression vectors and sequences are confirmed by DNA sequencing. The humanized antibodies are expressed in cells, such as 293F and the proteins are tested, for example in MDM phagocytosis assays and antigen binding assays. The humanized antigen binding units are compared with parental antigen binding units in antigen binding affinity, for example, by FACS on cells expressing the target antigen. If the affinity is greater than 2-fold lower than parental antigen binding unit, a second round of humanized variants can be generated and tested as described above.

[0287] As noted above, an anti-Gal3 antibody or binding fragment thereof can be either “monovalent” or “multivalent.” Whereas the former has one binding site per antigen-binding unit, the latter contains multiple binding sites capable of binding to more than one antigen of the same or different kind. Depending on the number of binding sites, antigen binding units may be bivalent (having two antigen-binding sites), trivalent (having three antigen-binding sites), tetravalent (having four antigen-binding sites), and so on.

[0288] Multivalent anti-Gal3 antibodies or binding fragments thereof can be further classified on the basis of their binding specificities. A “monospecific” anti-Gal3 antibody or binding fragment thereof is a molecule capable of binding to one or more antigens of the same kind. A “multispecific” anti-Gal3 antibody or binding fragment thereof is a molecule having binding specificities for at least two different antigens. While such molecules normally will only bind two distinct antigens (i.e. bispecific anti-Gal3 antibodies), antibodies with additional specificities such as trispecific antibodies are encompassed by this expression when used herein. This disclosure further provides multispecific anti-Gal3 antibodies. Multispecific anti-Gal3 antibodies or binding fragments thereof are multivalent molecules capable of binding to at least two distinct antigens, e.g., bispecific and trispecific molecules exhibiting binding specificities to two and three distinct antigens, respectively.

[0289] In some embodiments, the methods further provide for screening for or identifying antibodies or binding fragments thereof capable of disrupting an interaction between Gal3 and a target protein, such as an insulin receptor or glucose transporter. A non-limiting example of such a method is described in Example 1. In some aspects, the method may comprise: (a) contacting Gal3 protein with an antibody or binding fragment thereof that selectively binds to Gal3, thereby forming a Gal3-antibody complex; (b) contacting the Gal3-antibody complex with the target protein; (c) removing unbound target protein; and (d) detecting the target protein bound to the Gal3-antibody complex, wherein the antibody or binding fragment thereof is capable of disrupting an interaction of Gal3 and the target protein when the target protein is not detected in (d). In some cases, the method comprises an immunoassay. In some cases, the immunoassay is an enzyme-linked immunosorbent assay (ELISA).

### Host Cells

[0290] In some embodiments, the present disclosure provides host cells expressing any one of the anti-Gal3 antibodies or binding fragments thereof disclosed herein. A subject host cell typically comprises a nucleic acid encoding any one of the anti-Gal3 antibodies or binding fragments thereof disclosed herein.

[0291] The disclosure provides host cells transfected with the polynucleotides, vectors, or a library of the vectors described above. The vectors can be introduced into a suitable prokaryotic or eukaryotic cell by any of a number of appropriate means, including electroporation, microprojectile bombardment; lipofection, infection (where the vector is coupled to an infectious agent), transfection employing calcium chloride, rubidium chloride, calcium phosphate, DEAE-dextran, or other substances. The choice of the means for introducing vectors will often depend on features of the host cell.

[0292] For most animal cells, any of the above-mentioned methods is suitable for vector delivery. Preferred animal cells are vertebrate cells, preferably mammalian cells, capable of expressing exogenously introduced gene products in large quantity, e.g. at the milligram level. Non-limiting examples of preferred cells are NIH3T3 cells, COS, HeLa, and CHO cells.

[0293] Once introduced into a suitable host cell, expression of the anti-Gal3 antibodies or binding fragments thereof can be determined using any nucleic acid or protein assay known in the art. For example, the presence of transcribed mRNA of light chain CDRs or heavy chain CDRs, or the anti-Gal3 antibody or binding fragment thereof can be detected and/or quantified by conventional hybridization assays (e.g. Northern blot analysis), amplification procedures (e.g. RT-PCR), SAGE (U.S. Pat. No. 5,695,937), and array-based technologies (see e.g. U.S. Pat. Nos. 5,405,783, 5,412,087 and 5,445,934), using probes complementary to any region of a polynucleotide that encodes the anti-Gal3 antibody or binding fragment thereof.

[0294] Expression of the vector can also be determined by examining the expressed anti-Gal3 antibody or binding fragment thereof. A variety of techniques are available in the art for protein analysis. They include but are not limited to radioimmunoassays, ELISA (enzyme linked immunoradiometric assays), “sandwich” immunoassays, immunoradiometric assays, in situ immunoassays (using e.g., colloidal gold, enzyme or radioisotope labels), western blot analysis, immunoprecipitation assays, immunofluorescent assays, and SDS-PAGE.

### Payload

[0295] In some embodiments, any anti-Gal3 antibody disclosed herein further comprises a payload. In some cases, the payload comprises a small molecule, a protein or functional fragment thereof, a peptide, or a nucleic acid polymer.

[0296] In some cases, the number of payloads conjugated to the anti-Gal3 antibody (e.g., the drug-to-antibody ratio or DAR) is about 1:1, one payload to one anti-Gal3 antibody. In some cases, the ratio of the payloads to the anti-Gal3 antibody is about 2:1, 3:1, 4:1, 5:1, 6:1, 7:1, 8:1, 9:1, 10:1, 11:1, 12:1, 13:1, 14:1, 15:1, 16:1, 17:1, 18:1, 19:1, or 20:1. In some cases, the ratio of the payloads to the anti-Gal3 antibody is about 2:1. In some cases, the ratio of the payloads to the anti-Gal3 antibody is about 3:1. In some cases, the ratio of the payloads to the anti-Gal3 antibody is about 4:1. In some cases, the ratio of the payloads to the anti-Gal3 antibody is about 6:1. In some cases, the ratio of the payloads to the anti-Gal3 antibody is about 8:1. In some cases, the ratio of the payloads to the anti-Gal3 antibody is about 12:1.

[0297] In some embodiment, the payload is a small molecule. In some instances, the small molecule is a cytotoxic payload. Exemplary cytotoxic payloads include, but are not limited to, microtubule disrupting agents, DNA modifying agents, or Akt inhibitors.

[0298] In some embodiments, the payload comprises a microtubule disrupting agent. Exemplary microtubule disrupting agents include, but are not limited to, 2-methoxyestradiol, auristatin, chalcones, colchicine, combretastatin, cryptophycin, dictyostatin, discodermolide, dolastain, eleutherobin, epothilone, halichondrin, laulimalide, maytansine, noscapinoid, paclitaxel, peloruside, phomopsin, podophyllotoxin, rhizoxin, spongistatin, taxane, tubulysin, vinca alkaloid, vinorelbine, or derivatives or analogs thereof.

[0299] In some embodiments, the maytansine is a maytansinoid. In some embodiments, the maytansinoid is DM1, DM4, or ansamitocin. In some embodiments, the maytansinoid is DM1. In some embodiments, the maytansinoid is DM4. In some embodiments, the maytansinoid is ansamitocin. In some embodiments, the maytansinoid is a maytansionid derivative or analog such as described in U.S. Pat. Nos. 5,208,020, 5,416,064, 7,276,497, and 6,716,821 or U.S. Publication Nos. 2013029900 and US20130323268.

[0300] In some embodiments, the payload is a dolastatin, or a derivative or analog thereof. In some embodiments, the dolastatin is dolastatin 10 or dolastatin 15, or derivatives or analogs thereof. In some embodiments, the dolastatin 10 analog is auristatin, soblidotin, symplostatin 1, or symplostatin 3. In some embodiments, the dolastatin 15 analog is cemadotin or tasidotin.

[0301] In some embodiments, the dolastatin 10 analog is auristatin or an auristatin derivative. In some embodiments, the auristatin or auristatin derivative is auristatin E (AE), auristatin F (AF), auristatin E5-benzoylvaleric acid ester (AEVB), monomethyl auristatin E (MMAE), monomethyl auristatin F (MMAF), or monomethyl auristatin D (MMAD), auristatin PE, or auristatin PYE. In some embodiments, the auristatin derivative is monomethyl auristatin E (MMAE). In some embodiments, the auristatin derivative is monomethyl auristatin F (MMAF). In some embodiments, the auristatin is an auristatin derivative or analog such as described in U.S. Pat. Nos. 6,884,869, 7,659,241, 7,498,298, 7,964,566, 7,750,116, 8,288,352, 8,703,714, and 8,871,720.

[0302] In some embodiments, the payload comprises a DNA modifying agent. In some embodiments, the DNA modifying agent comprises DNA cleavers, DNA intercalators, DNA transcription inhibitors, or DNA cross-linkers. In some instances, the DNA cleaver comprises bleomycine A2, calicheamicin, or derivatives or analogs thereof. In some instances, the DNA intercalator comprises doxorubicin, epirubicin, PNU-159682, duocarmycin, pyrrolobenzodiazepine, oligomycin C, daunorubicin, valrubicin, topotecan, or derivatives or analogs thereof. In some instances, the DNA transcription inhibitor comprises dactinomycin. In some instances, the DNA cross-linker comprises mitomycin C.

[0303] In some embodiments, the DNA modifying agent comprises amsacrine, anthracycline, camptothecin, doxorubicin, duocarmycin, enediyne, etoposide, indolinobenzodiazepine, netropsin, teniposide, or derivatives or analogs thereof.

[0304] In some embodiments, the anthracycline is doxorubicin, daunorubicin, epirubicin, idarubicin, mitomycin-C, dactinomycin, mithramycin, nemorubicin, pixantrone, sabarubicin, or valrubicin.

[0305] In some embodiments, the analog of camptothecin is topotecan, irinotecan, silatecan, cositecan, exatecan, lurtotecan, gimatecan, belotecan, rubitecan, or SN-38.

[0306] In some embodiments, the duocarmycin is duocarmycin A, duocarmycin B1, duocarmycin B2, duocarmycin C1, duocarmycin C2, duocarmycin D, duocarmycin SA, or CC-1065. In some embodiments, the enediyne is a calicheamicin, esperamicin, or dynemicin A.

[0307] In some embodiments, the pyrrolobenzodiazepine is anthramycin, abbeymycin, chicamycin, DC-81, mazethramycin, neothramycins A, neothramycin B, porothramycin, prothracarcin, sibanomicin (DC-102), sibiromycin, or tomaymycin. In some embodiments, the pyrrolobenzodiazepine is a tomaymycin derivative, such as described in U.S. Pat. Nos. 8,404,678 and 8,163,736. In some embodiments, the pyrrolobenzodiazepine is such as described in U.S. Pat. Nos. 8,426,402, 8,802,667, 8,809,320, 6,562,806, 6,608,192, 7,704,924, 7,067,511, 7,612,062, 7,244,724, 7,528,126, 7,049,311, 8,633,185, 8,501,934, and 8,697,688 and U.S. Publication No. US20140294868.

[0308] In some embodiments, the pyrrolobenzodiazepine is a pyrrolobenzodiazepine dimer. In some embodiments, the PBD dimer is a symmetric dimer. Examples of symmetric PBD dimers include, but are not limited to, SJG-136 (SG-2000), ZC-423 (SG2285), SJG-720, SJG-738, ZC-207 (SG2202), and DSB-120. In some embodiments, the PBD dimer is an unsymmetrical dimer. Examples of unsymmetrical PBD dimers include, but are not limited to, SJG-136 derivatives such as described in U.S. Pat. Nos. 8,697,688 and 9,242,013 and U.S. Publication No. 20140286970.

[0309] In some embodiments, the payload comprises an Akt inhibitor. In some cases, the Akt inhibitor comprises ipatasertib (GDC-0068) or derivatives thereof.

[0310] In some embodiments, the payload comprises a polymerase inhibitor, including, but not limited to polymerase II inhibitors such as a-amanitin, and poly(ADP-ribose) polymerase (PARP) inhibitors. Exemplary PARP inhibitors include, but are not limited to Iniparib (BSI 201), Talazoparib (BMN-673), Olaparib (AZD-2281), Olaparib, Rucaparib (AG014699, PF-01367338), Veliparib (ABT-888), CEP 9722, MK 4827, BGB-290, or 3-aminobenzamide.

[0311] In some embodiments, the payload comprises a detectable moiety. As used herein, a “detectable moiety” may comprise an atom, molecule, or compound that is useful in diagnosing, detecting or visualizing a location and/or quantity of a target molecule, cell, tissue, organ, and the like. Detectable moieties that can be used in accordance with the embodiments herein include, but are not limited to, radioactive substances (e.g. radioisotopes, radionuclides, radiolabels or radiotracers), dyes, contrast agents, fluorescent compounds or molecules, bioluminescent compounds or molecules, enzyme and enhancing agents (e.g. paramagnetic ions), or specific binding moieties such as streptavidin, avidin, or biotin. In addition, some nanoparticles, for example quantum dots or metal nanoparticles can be suitable for use as a detectable moiety.

[0312] Exemplary radioactive substances that can be used as detectable moieties in accordance with the embodiments herein include, but are not limited to, ¹⁸F, ¹⁸F-FAC, ³²P, ³³P, ⁴⁵Ti, ⁴⁷Sc, ⁵²Fe, ⁵⁹Fe, ⁶²Cu, ⁶⁴Cu, ⁶⁷Cu, ⁶⁷Ga ⁶⁸Ga, ⁷⁵Sc, ⁷⁷As, ⁸⁶Y, ⁹⁰Y, ⁸⁹Sr, ⁸⁹Zr, ⁹⁴Tc, ⁹⁴Tc, ⁹⁹mTc, ⁹⁹Mo, ¹⁰⁵Pd, ¹⁵Rh, ¹¹¹Ag, ¹¹¹In, ¹²³I, ¹²⁴I, ¹²⁵I, ¹³¹I, ¹⁴²Pr, ¹⁴³Pr, ¹⁴⁹Pm, ¹⁵³Sm ¹⁵⁴⁻¹⁵⁸Gd, ¹⁶¹Tb, ¹⁶⁶Dy, ¹⁶⁶Ho, ¹⁶⁹Er, ¹⁷⁵Lu, ¹⁷⁷Lu, ¹⁸⁶Re, ¹⁸⁸Re, ¹⁸⁹Re, ¹⁹⁴Ir, ¹⁹⁸Au, ¹⁹⁹Au, ²¹¹At, ²¹¹Pb, ²¹²Bi, ²¹²Pb, ²¹³Bi, ²²³Ra and ²²⁵Ac. Exemplary paramagnetic ions substances that can be used as detectable markers include, but are not limited to ions of transition and lanthanide metals (e.g. metals having atomic numbers of 6 to 9, 21-29, 42, 43, 44, or 57-71). These metals include ions of Cr, V, Mn, Fe, Co, Ni, Cu, La, Ce, Pr, Nd, Pm, Sm, Eu, Gd, Tb, Dy, Ho, Er, Tm, Yb and Lu.

[0313] When the detectable marker is a radioactive metal or paramagnetic ion, in some embodiments, the marker can be reacted with a reagent having a long tail with one or more chelating groups attached to the long tail for binding these ions. The long tail can be a polymer such as apolylysine, polysaccharide, or other derivatized or derivatizable chain having pendant groups to which may be bound to a chelating group for binding the ions. Examples of chelating groups that may be used according to the embodiments herein include, but are not limited to, ethylenediaminetetraacetic acid (EDTA), diethylenetriaminepentaacetic acid (DTPA), DOTA, NOTA, NOGADA, NETA, deferoxamine (DfO), porphyrins, polyamines, crown ethers, bis-thiosemicarbazones, polyoximes, and like groups. The chelate can be linked to the antigen binding construct by a group which allows formation of a bond to the molecule with minimal loss of immunoreactivity and minimal aggregation and/or internal cross-linking. The same chelates, when complexed with non-radioactive metals, such as manganese, iron and gadolinium are useful for MRI, when used along with the antigen binding constructs and carriers described herein. Macrocyclic chelates such as NOTA, NOGADA, DOTA, and TETA are of use with a variety of metals and radiometals including, but not limited to, radionuclides of gallium, yttrium and copper, respectively. Other ring-type chelates such as macrocyclic polyethers, which are of interest for stably binding radionuclides, such as Radium-223 for RAIT may be used. In certain embodiments, chelating moieties may be used to attach a PET imaging agent, such as an Aluminum-¹⁸F complex, to a targeting molecule for use in PET analysis.

[0314] Exemplary contrast agents that can be used as detectable moieties in accordance with the embodiments of the disclosure include, but are not limited to, barium, diatrizoate, ethiodized oil, gallium citrate, iocarmic acid, iocetamic acid, iodamide, iodipamide, iodoxamic acid, iogulamide, iohexyl, iopamidol, iopanoic acid, ioprocemic acid, iosefamic acid, ioseric acid, iosulamide meglumine, iosemetic acid, iotasul, iotetric acid, iothalamic acid, iotroxic acid, ioxaglic acid, ioxotrizoic acid, ipodate, meglumine, metrizamide, metrizoate, propyliodone, thallous chloride, or combinations thereof.

[0315] Bioluminescent and fluorescent compounds or molecules and dyes that can be used as detectable moieties in accordance with the embodiments of the disclosure include, but are not limited to, fluorescein, fluorescein isothiocyanate (FITC), OREGON GREEN™ rhodamine, Texas red, tetrarhodimine isothiocynate (TRITC), Cy3, Cy5, and the like), fluorescent markers (e.g., green fluorescent protein (GFP), phycoerythrin, and the like), autoquenched fluorescent compounds that are activated by tumor-associated proteases, enzymes (e.g., luciferase, horseradish peroxidase, alkaline phosphatase, and the like), nanoparticles, biotin, digoxigenin or combinations thereof.

[0316] Enzymes that can be used as detectable moieties in accordance with the embodiments of the disclosure include, but are not limited to, horseradish peroxidase, alkaline phosphatase, acid phosphatase, glucose oxidase, β-galactosidase, β-glucoronidase or β-lactamase. Such enzymes may be used in combination with a chromogen, a fluorogenic compound or a luminogenic compound to generate a detectable signal.

[0317] In some embodiments, the payload is a nanoparticle. The term “nanoparticle” refers to a microscopic particle whose size is measured in nanometers, e.g., a particle with at least one dimension less than about 100 nm. Nanoparticles can be used as detectable substances because they are small enough to scatter visible light rather than absorb it. For example, gold nanoparticles possess significant visible light extinction properties and appear deep red to black in solution. As a result, compositions comprising antigen binding constructs conjugated to nanoparticles can be used for the in vivo imaging of T-cells in a subject. At the small end of the size range, nanoparticles are often referred to as clusters. Metal, dielectric, and semiconductor nanoparticles have been formed, as well as hybrid structures (e.g. core-shell nanoparticles). Nanospheres, nanorods, and nanocups are just a few of the shapes that have been grown. Semiconductor quantum dots and nanocrystals are examples of additional types of nanoparticles. Such nanoscale particles can be used as payloads to be conjugated to any one of the anti-Gal3 antibodies disclosed herein.

[0318] In some embodiments, the payload comprises an immunomodulatory agent. Useful immunomodulatory agents include anti-hormones that block hormone action on tumors and immunosuppressive agents that suppress cytokine production, down-regulate self-antigen expression, or mask MHC antigens. Representative anti-hormones include anti-estrogens including, for example, tamoxifen, raloxifene, aromatase inhibiting 4(5)-imidazoles, 4-hydroxytamoxifen, trioxifene, keoxifene, LY 117018, onapnstone, and toremifene; and anti-androgens such as flutamide, nilutamide, bicalutamide, leuprolide, and goserelin; and anti-adrenal agents. Illustrative immunosuppressive agents include, but are not limited to 2-amino-6-aryl-5-substituted pyrimidines, azathioprine, cyclophosphamide, bromocryptine, danazol, dapsone, glutaraldehyde, anti-idiotypic antibodies for MHC antigens and MHC fragments, cyclosporin A, steroids such as glucocorticosteroids, streptokinase, or rapamycin.

[0319] In some embodiments, the payload comprises an immune modulator. Exemplary immune modulators include, but are not limited to, gancyclovier, etanercept, tacrolimus, sirolimus, voclosporin, cyclosporine, rapamycin, cyclophosphamide, azathioprine, mycophenolgate mofetil, methotrextrate, glucocorticoid and its analogs, xanthines, stem cell growth factors, lymphotoxins, hematopoietic factors, tumor necrosis factor (TNF) (e.g., TNFα), interleukins (e.g., interleukin-1 (IL-1), IL-2, IL-3, IL-6, IL-10, IL-12, IL-18, and IL-21), colony stimulating factors (e.g., granulocyte-colony stimulating factor (G-CSF) and granulocyte macrophage-colony stimulating factor (GM-CSF)), interferons (e.g., interferons-alpha, interferon-beta, interferon-gamma), the stem cell growth factor designated “S1 factor,” erythropoietin and thrombopoietin, or a combination thereof.

[0320] In some embodiments, the payload comprises an immunotoxin. Immunotoxins include, but are not limited to, ricin, radionuclides, pokeweed antiviral protein, Pseudomonas exotoxin A, diphtheria toxin, ricin A chain, fungal toxins such as restrictocin and phospholipase enzymes. See, generally, “Chimeric Toxins,” Olsnes and Pihl, Pharmac. Ther. 15:355-381 (1981); and “Monoclonal Antibodies for Cancer Detection and Therapy,” eds. Baldwin and Byers, pp. 159-179, 224-266, Academic Press (1985).

[0321] In some instances, the payload comprises a nucleic acid polymer. In such instances, the nucleic acid polymer comprises short interfering nucleic acid (siNA), short interfering RNA (siRNA), double-stranded RNA (dsRNA), micro-RNA (miRNA), short hairpin RNA (shRNA), an antisense oligonucleotide. In other instances, the nucleic acid polymer comprises an mRNA, encoding, e.g., a cytotoxic protein or peptide or an apoptotic triggering protein or peptide. Exemplary cytotoxic proteins or peptides include a bacterial cytotoxin such as an alpha-pore forming toxin (e.g., cytolysin A from E. coli), a beta-pore-forming toxin (e.g., α-Hemolysin, PVL—panton Valentine leukocidin, aerolysin, clostridial Epsilon-toxin, Clostridium perfringens enterotoxin), binary toxins (anthrax toxin, edema toxin, C. botulinum C2 toxin, C spirofome toxin, C. perfringens iota toxin, C. difficile cyto-lethal toxins (A and B)), prion, parasporin, a cholesterol-dependent cytolysins (e.g., pneumolysin), a small pore-forming toxin (e.g., Gramicidin A), a cyanotoxin (e.g., microcystins, nodularins), a hemotoxin, a neurotoxin (e.g., botulinum neurotoxin), a cytotoxin, cholera toxin, diphtheria toxin, Pseudomonas exotoxin A, tetanus toxin, or an immunotoxin (idarubicin, ricin A, CRM9, Pokeweed antiviral protein, DT). Exemplary apoptotic triggering proteins or peptides include apoptotic protease activating factor-1 (Apaf-1), cytochrome-c, caspase initiator proteins (CASP2, CASP8, CASP9, CASP10), apoptosis inducing factor (AIF), p53, p73, p63, Bcl-2, Bax, granzyme B, poly-ADP ribose polymerase (PARP), and P 21-activated kinase 2 (PAK2). In additional instances, the nucleic acid polymer comprises a nucleic acid decoy. In some instances, the nucleic acid decoy is a mimic of protein-binding nucleic acids such as RNA-based protein-binding mimics. Exemplary nucleic acid decoys include transactivating region (TAR) decoy and Rev response element (RRE) decoy.

[0322] In some cases, the payload is an aptamer. Aptamers are small oligonucleotide or peptide molecules that bind to specific target molecules. Exemplary nucleic acid aptamers include DNA aptamers, RNA aptamers, or XNA aptamers which are RNA and/or DNA aptamers comprising one or more unnatural nucleotides. Exemplary nucleic acid aptamers include ARC19499 (Archemix Corp.), REG1 (Regado Biosciences), and ARC1905 (Ophthotech).

[0323] Nucleic acids in accordance with the embodiments described herein optionally include naturally occurring nucleic acids, or one or more nucleotide analogs or have a structure that otherwise differs from that of a naturally occurring nucleic acid. For example, 2′-modifications include halo, alkoxy, and allyloxy groups. In some embodiments, the 2′-OH group is replaced by a group selected from H, OR, R, halo, SH, SR, NH₂, NHR, NR₂ or CN, wherein R is C₁-C₆ alkyl, alkenyl, or alkynyl, and halo is F, Cl, Br, or I. Examples of modified linkages include phosphorothioate and 5′-N-phosphoramidite linkages.

[0324] Nucleic acids having a variety of different nucleotide analogs, modified backbones, or non-naturally occurring internucleoside linkages are utilized in accordance with the embodiments described herein. In some cases, nucleic acids include natural nucleosides (i.e., adenosine, thymidine, guanosine, cytidine, uridine, deoxyadenosine, deoxythymidine, deoxyguanosine, and deoxycytidine) or modified nucleosides. Examples of modified nucleotides include base modified nucleoside (e.g., aracytidine, inosine, isoguanosine, nebularine, pseudouridine, 2,6-diaminopurine, 2-aminopurine, 2-thiothymidine, 3-deaza-5-azacytidine, 2′-deoxyuridine, 3-nitorpyrrole, 4-methylindole, 4-thiouridine, 4-thiothymidine, 2-aminoadenosine, 2-thiothymidine, 2-thiouridine, 5-bromocytidine, 5-iodouridine, inosine, 6-azauridine, 6-chloropurine, 7-deazaadenosine, 7-deazaguanosine, 8-azaadenosine, 8-azidoadenosine, benzimidazole, M1-methyladenosine, pyrrolo-pyrimidine, 2-amino-6-chloropurine, 3-methyl adenosine, 5-propynylcytidine, 5-propynyluridine, 5-bromouridine, 5-fluorouridine, 5-methylcytidine, 7-deazaadenosine, 7-deazaguanosine, 8-oxoadenosine, 8-oxoguanosine, 0(6)-methylguanine, and 2-thiocytidine), chemically or biologically modified bases (e.g., methylated bases), modified sugars (e.g., 2′-fluororibose, 2′-aminoribose, 2′-azidoribose, 2′-O-methylribose, L-enantiomeric nucleosides arabinose, and hexose), modified phosphate groups (e.g., phosphorothioates and 5′-N-phosphoramidite linkages), and combinations thereof. Natural and modified nucleotide monomers for the chemical synthesis of nucleic acids are readily available. In some cases, nucleic acids comprising such modifications display enhanced properties relative to nucleic acids consisting only of naturally occurring nucleotides. In some embodiments, nucleic acid modifications described herein are utilized to reduce and/or prevent digestion by nucleases (e.g. exonucleases, endonucleases, etc.). For example, the structure of a nucleic acid may be stabilized by including nucleotide analogs at the 3′ end of one or both strands order to reduce digestion.

[0325] Different nucleotide modifications and/or backbone structures may exist at various positions in the nucleic acid. Such modifications include morpholinos, peptide nucleic acids (PNAs), methylphosphonate nucleotides, thiolphosphonate nucleotides, 2′-fluoro N3-P5′-phosphoramidites, 1′, 5′-anhydrohexitol nucleic acids (HNAs), or a combination thereof.

[0326] Any of the anti-Gal3 antibodies disclosed herein may be conjugated to one or more (e.g. 1, 2, 3, 4, 5, 6, 7, 8, 9, or 10, or more) payloads described herein.

### Conjugation Chemistry

[0327] In some instances, the payload is conjugated to an anti-Gal3 antibody described herein by a native ligation. In some instances, the conjugation is as described in: Dawson, et al. “Synthesis of proteins by native chemical ligation,” Science 1994, 266, 776-779; Dawson, et al. “Modulation of Reactivity in Native Chemical Ligation through the Use of Thiol Additives,” J. Am. Chem. Soc. 1997, 119, 4325-4329; Hackeng, et al. “Protein synthesis by native chemical ligation: Expanded scope by using straightforward methodology.,” Proc. Natl. Acad. Sci. USA 1999, 96, 10068-10073; or Wu, et al. “Building complex glycopeptides: Development of a cysteine-free native chemical ligation protocol,” Angew. Chem. Int. Ed. 2006, 45, 4116-4125. In some instances, the conjugation is as described in U.S. Pat. No. 8,936,910.

[0328] In some instances, the payload is conjugated to an anti-Gal3 antibody described herein by a site-directed method utilizing a “traceless” coupling technology (Philochem). In some instances, the “traceless” coupling technology utilizes an N-terminal 1,2-aminothiol group on the binding moiety which is then conjugate with a polynucleic acid molecule containing an aldehyde group. (see Casi et al., “Site-specific traceless coupling of potent cytotoxic drugs to recombinant antibodies for pharmacodelivery,” JACS 134(13): 5887-5892 (2012))

[0329] In some instances, the payload is conjugated to an anti-Gal3 antibody described herein by a site-directed method utilizing an unnatural amino acid incorporated into the binding moiety. In some instances, the unnatural amino acid comprises p-acetylphenylalanine (pAcPhe). In some instances, the keto group of pAcPhe is selectively coupled to an alkoxy-amine derivatived conjugating moiety to form an oxime bond. (see Axup et al., “Synthesis of site-specific antibody-drug conjugates using unnatural amino acids,” PNAS 109(40): 16101-16106 (2012)).

[0330] In some instances, the payload is conjugated to an anti-Gal3 antibody described herein by a site-directed method utilizing an enzyme-catalyzed process. In some instances, the site-directed method utilizes SMARTag™ technology (Redwood). In some instances, the SMARTag™ technology comprises generation of a formylglycine (FGly) residue from cysteine by formylglycine-generating enzyme (FGE) through an oxidation process under the presence of an aldehyde tag and the subsequent conjugation of FGly to an alkylhydraine-functionalized polynucleic acid molecule via hydrazino-Pictet-Spengler (HIPS) ligation. (see Wu et al., “Site-specific chemical modification of recombinant proteins produced in mammalian cells by using the genetically encoded aldehyde tag,” PNAS 106(9): 3000-3005 (2009); Agarwal, et al., “A Pictet-Spengler ligation for protein chemical modification,” PNAS 110(1): 46-51 (2013)).

[0331] In some instances, the enzyme-catalyzed process comprises microbial transglutaminase (mTG). In some cases, the payload is conjugated to the anti-Gal3 antibody utilizing a microbial transglutaminze catalyzed process. In some instances, mTG catalyzes the formation of a covalent bond between the amide side chain of a glutamine within the recognition sequence and a primary amine of a functionalized polynucleic acid molecule. In some instances, mTG is produced from Streptomyces mobarensis. (see Strop et al., “Location matters: site of conjugation modulates stability and pharmacokinetics of antibody drug conjugates,” Chemistry and Biology 20(2) 161-167 (2013)).

[0332] In some instances, the payload is conjugated to an anti-Gal3 antibody by a method as described in PCT Publication No. WO2014/140317, which utilizes a sequence-specific transpeptidase and is hereby expressly incorporated by reference in its entirety.

[0333] In some instances, the payload is conjugated to an anti-Gal3 antibody described herein by a method as described in U.S. Patent Publication Nos. 2015/0105539 and 2015/0105540.

### Linker

[0334] In some instances, a linker described herein comprises a natural or synthetic polymer, consisting of long chains of branched or unbranched monomers, and/or cross-linked network of monomers in two or three dimensions. In some instances, the linker includes a polysaccharide, lignin, rubber, or polyalkylen oxide (e.g., polyethylene glycol).

[0335] In some instances, the linker includes, but is not limited to, alpha-, omega-dihydroxylpolyethyleneglycol, biodegradable lactone-based polymer, e.g. polyacrylic acid, polylactide acid (PLA), poly(glycolic acid) (PGA), polypropylene, polystyrene, polyolefin, polyamide, polycyanoacrylate, polyimide, polyethylenterephthalat (PET, PETG), polyethylene terephthalate (PETE), polytetramethylene glycol (PTG), or polyurethane as well as mixtures thereof. As used herein, a mixture refers to the use of different polymers within the same compound as well as in reference to block copolymers. In some cases, block copolymers are polymers wherein at least one section of a polymer is built up from monomers of another polymer. In some instances, the linker comprises polyalkylene oxide. In some instances, the linker comprises PEG. In some instances, the linker comprises polyethylene imide (PEI) or hydroxy ethyl starch (HES).

[0336] In some cases, the polyalkylene oxide (e.g., PEG) is a polydispers or monodispers compound. In some instances, polydispers material comprises disperse distribution of different molecular weight of the material, characterized by mean weight (weight average) size and dispersity. In some instances, the monodisperse PEG comprises one size of molecules. In some embodiments, the linker is poly- or monodispersed polyalkylene oxide (e.g., PEG) and the indicated molecular weight represents an average of the molecular weight of the polyalkylene oxide, e.g., PEG, molecules.

[0337] In some embodiments, the linker comprises a polyalkylene oxide (e.g., PEG) and the molecular weight of the polyalkylene oxide (e.g., PEG) is about 200, 300, 400, 500, 600, 700, 800, 900, 1000, 1100, 1200, 1300, 1400, 1450, 1500, 1600, 1700, 1800, 1900, 2000, 2100, 2200, 2300, 2400, 2500, 2600, 2700, 2800, 2900, 3000, 3250, 3350, 3500, 3750, 4000, 4250, 4500, 4600, 4750, 5000, 5500, 6000, 6500, 7000, 7500, 8000, 10,000, 12,000, 20,000, 35,000, 40,000, 50,000, 60,000, or 100,000 Da.

[0338] In some embodiments, the polyalkylene oxide (e.g., PEG) is a discrete PEG, in which the discrete PEG is a polymeric PEG comprising more than one repeating ethylene oxide units. In some instances, a discrete PEG (dPEG) comprises from 2 to 60, from 2 to 50, or from 2 to 48 repeating ethylene oxide units. In some instances, a dPEG comprises about 2, 3, 4, 5, 6, 7, 8, 9, 10, 11, 12, 13, 14, 15, 16, 17, 18, 19, 20, 22, 24, 26, 28, 30, 35, 40, 42, 48, 50 or more repeating ethylene oxide units. In some instances, a dPEG comprises about 2 or more repeating ethylene oxide units. In some cases, a dPEG is synthesized as a single molecular weight compound from pure (e.g., about 95%, 98%, 99%, or 99.5%) staring material in a step-wise fashion. In some cases, a dPEG has a specific molecular weight, rather than an average molecular weight.

[0339] In some instances, the linker is a discrete PEG, optionally comprising from 2 to 60, from 2 to 50, or from 2 to 48 repeating ethylene oxide units. In some cases, the linker comprises a dPEG comprising about 2, 3, 4, 5, 6, 7, 8, 9, 10, 11, 12, 13, 14, 15, 16, 17, 18, 19, 20, 22, 24, 26, 28, 30, 35, 40, 42, 48, 50 or more repeating ethylene oxide units.

[0340] In some embodiments, the linker is a polypeptide linker. In some instances, the polypeptide linker comprises at least 2, 3, 4, 5, 6, 7, 8, 10, 15, 20, 25, 30, 35, 40, 45, 50, 60, 70, 80, 90, 100, or more amino acid residues. In some instances, the polypeptide linker comprises at least 2, 3, 4, 5, 6, 7, 8, or more amino acid residues. In some instances, the polypeptide linker comprises at most 2, 3, 4, 5, 6, 7, 8, or less amino acid residues. In some cases, the polypeptide linker is a cleavable polypeptide linker (e.g., either enzymatically or chemically). In some cases, the polypeptide linker is a non-cleavable polypeptide linker. In some instances, the polypeptide linker comprises Val-Cit (valine-citrulline), Gly-Gly-Phe-Gly, Phe-Lys, Val-Lys, Gly-Phe-Lys, Phe-Phe-Lys, Ala-Lys, Val-Arg, Phe-Cit, Phe-Arg, Leu-Cit, Ile-Cit, Trp-Cit, Phe-Ala, Ala-Leu-Ala-Leu, or Gly-Phe-Leu-Gly. In some instances, the polypeptide linker comprises a peptide such as: Val-Cit (valine-citrulline), Gly-Gly-Phe-Gly, Phe-Lys, Val-Lys, Gly-Phe-Lys, Phe-Phe-Lys, Ala-Lys, Val-Arg, Phe-Cit, Phe-Arg, Leu-Cit, Ile-Cit, Trp-Cit, Phe-Ala, Ala-Leu-Ala-Leu, or Gly-Phe-Leu-Gly. In some cases, the polypeptide linker comprises L-amino acids, D-amino acids, or a mixture of both L- and D-amino acids.

[0341] In some instances, the linker comprises a homobifuctional linker. Exemplary homobifuctional linkers include, but are not limited to, Lomant's reagent dithiobis (succinimidylpropionate) DSP, 3′3′-dithiobis(sulfosuccinimidyl proprionate (DTSSP), disuccinimidyl suberate (DSS), bis(sulfosuccinimidyl)suberate (BS), disuccinimidyl tartrate (DST), disulfosuccinimidyl tartrate (sulfo DST), ethylene glycobis(succinimidylsuccinate) (EGS), disuccinimidyl glutarate (DSG), N,N′-disuccinimidyl carbonate (DSC), dimethyl adipimidate (DMA), dimethyl pimelimidate (DMP), dimethyl suberimidate (DMS), dimethyl-3,3′-dithiobispropionimidate (DTBP), 1,4-di-3′-(2′-pyridyldithio)propionamido)butane (DPDPB), bismaleimidohexane (BMH), aryl halide-containing compound (DFDNB), such as e.g. 1,5-difluoro-2,4-dinitrobenzene or 1,3-difluoro-4,6-dinitrobenzene, 4,4′-difluoro-3,3′-dinitrophenylsulfone (DFDNPS), bis-[D-(4-azidosalicylamido)ethyl]disulfide (BASED), formaldehyde, glutaraldehyde, 1,4-butanediol diglycidyl ether, adipic acid dihydrazide, carbohydrazide, o-toluidine, 3,3′-dimethylbenzidine, benzidine, α,α′-p-diaminodiphenyl, diiodo-p-xylene sulfonic acid, N,N′-ethylene-bis(iodoacetamide), or N,N′-hexamethylene-bis(iodoacetamide).

[0342] In some embodiments, the linker comprises a heterobifunctional linker. Exemplary heterobifunctional linker include, but are not limited to, amine-reactive and sulfhydryl cross-linkers such as N-succinimidyl 3-(2-pyridyldithio)propionate (sPDP), long-chain N-succinimidyl 3-(2-pyridyldithio)propionate (LC-sPDP), water-soluble-long-chain N-succinimidyl 3-(2-pyridyldithio) propionate (sulfo-LC-sPDP), succinimidyloxycarbonyl-α-methyl-α-(2-pyridyldithio)toluene (sMPT), sulfosuccinimidyl-6-[α-methyl-α-(2-pyridyldithio)toluamido]hexanoate (sulfo-LC-sMPT), succinimidyl-4-(N-maleimidomethyl)cyclohexane-1-carboxylate (sMCC), sulfosuccinimidyl-4-(N-maleimidomethyl)cyclohexane-1-carboxylate (sulfo-sMCC), m-maleimidobenzoyl-N-hydroxysuccinimide ester (MBs), m-maleimidobenzoyl-N-hydroxysulfosuccinimide ester (sulfo-MBs), N-succinimidyl(4-iodoacteyl)aminobenzoate (sIAB), sulfosuccinimidyl(4-iodoacteyl)aminobenzoate (sulfo-sIAB), succinimidyl-4-(p-maleimidophenyl)butyrate (sMPB), sulfosuccinimidyl-4-(p-maleimidophenyl)butyrate (sulfo-sMPB), N-(γ-maleimidobutyryloxy)succinimide ester (GMBs), N-(γ-maleimidobutyryloxy)sulfosuccinimide ester (sulfo-GMBs), succinimidyl 6-((iodoacetyl)amino)hexanoate (sIAX), succinimidyl 6-[6-(((iodoacetyl)amino)hexanoyl)amino]hexanoate (sIAXX), succinimidyl 4-(((iodoacetyl)amino)methyl)cyclohexane-1-carboxylate (sIAC), succinimidyl 6-((((4-iodoacetyl)amino)methyl)cyclohexane-1-carbonyl)amino) hexanoate (sIACX), p-nitrophenyl iodoacetate (NPIA), carbonyl-reactive and sulfhydryl-reactive cross-linkers such as 4-(4-N-maleimidophenyl)butyric acid hydrazide (MPBH), 4-(N-maleimidomethyl)cyclohexane-1-carboxyl-hydrazide-8 (M₂C2H), 3-(2-pyridyldithio)propionyl hydrazide (PDPH), amine-reactive and photoreactive cross-linkers such as N-hydroxysuccinimidyl-4-azidosalicylic acid (NHs-AsA), N-hydroxysulfosuccinimidyl-4-azidosalicylic acid (sulfo-NHs-AsA), sulfosuccinimidyl-(4-azidosalicylamido)hexanoate (sulfo-NHs-LC-AsA), sulfosuccinimidyl-2-(p-azidosalicylamido)ethyl-1,3′-dithiopropionate (sAsD), N-hydroxysuccinimidyl-4-azidobenzoate (HsAB), N-hydroxysulfosuccinimidyl-4-azidobenzoate (sulfo-HsAB), N-succinimidyl-6-(4′-azido-2′-nitrophenylamino)hexanoate (sANPAH), sulfosuccinimidyl-6-(4′-azido-2′-nitrophenylamino)hexanoate (sulfo-sANPAH), N-5-azido-2-nitrobenzoyloxysuccinimide (ANB-NOs), sulfosuccinimidyl-2-(m-azido-o-nitrobenzamido)-ethyl-1,3′-dithiopropionate (sAND), N-succinimidyl-4(4-azidophenyl)1,3′-dithiopropionate (sADP), N-sulfosuccinimidyl(4-azidophenyl)-1,3′-dithiopropionate (sulfo-sADP), sulfosuccinimidyl 4-(p-azidophenyl)butyrate (sulfo-sAPB), sulfosuccinimidyl 2-(7-azido-4-methylcoumarin-3-acetamide)ethyl-1,3′-dithiopropionate (sAED), sulfosuccinimidyl 7-azido-4-methylcoumain-3-acetate (sulfo-sAMCA), p-nitrophenyl diazopyruvate (pNPDP), p-nitrophenyl-2-diazo-3,3,3-trifluoropropionate (PNP-DTP), sulfhydryl-reactive and photoreactive cross-linkers such as1-(p-Azidosalicylamido)-4-(iodoacetamido)butane (AsIB), N-[4-(p-azidosalicylamido)butyl]-3′-(2′-pyridyldithio)propionamide (APDP), benzophenone-4-iodoacetamide, benzophenone-4-maleimide carbonyl-reactive and photoreactive cross-linkers such as p-azidobenzoyl hydrazide (ABH), carboxylate-reactive and photoreactive cross-linkers such as 4-(p-azidosalicylamido)butylamine (AsBA), and arginine-reactive and photoreactive cross-linkers such as p-azidophenyl glyoxal (APG).

[0343] In some embodiments, the linker comprises a benzoic acid group, or its derivatives thereof. In some instances, the benzoic acid group or its derivatives thereof comprise paraaminobenzoic acid (PABA). In some instances, the benzoic acid group or its derivatives thereof comprise gamma-aminobutyric acid (GABA).

[0344] In some embodiments, the linker comprises one or more of a maleimide group, a peptide moiety, and/or a benzoic acid group, in any combination. In some embodiments, the linker comprises a combination of a maleimide group, a peptide moiety, and/or a benzoic acid group. In some instances, the maleimide group is maleimidocaproyl (mc). In some instances, the peptide group is val-cit. In some instances, the benzoic acid group is PABA. In some instances, the linker comprises a mc-val-cit group. In some cases, the linker comprises a val-cit-PABA group. In additional cases, the linker comprises a mc-val-cit-PABA group.

[0345] In some embodiments, the linker is a self-immolative linker or a self-elimination linker. In some cases, the linker is a self-immolative linker. In other cases, the linker is a self-elimination linker (e.g., a cyclization self-elimination linker). In some instances, the linker comprises a linker described in U.S. Pat. No. 9,089,614 or PCT Publication No. WO2015038426.

[0346] In some embodiments, the linker is a dendritic type linker. In some instances, the dendritic type linker comprises a branching, multifunctional linker moiety. In some instances, the dendritic type linker comprises PAMAM dendrimers.

[0347] In some embodiments, the linker is a traceless linker or a linker in which after cleavage does not leave behind a linker moiety (e.g., an atom or a linker group) to the antibody or payload. Exemplary traceless linkers include, but are not limited to, germanium linkers, silicium linkers, sulfur linkers, selenium linkers, nitrogen linkers, phosphorus linkers, boron linkers, chromium linkers, or phenylhydrazide linker. In some cases, the linker is a traceless aryl-triazene linker as described in Hejesen, et al., “A traceless aryl-triazene linker for DNA-directed chemistry,” Org Biomol Chem 11(15): 2493-2497 (2013). In some instances, the linker is a traceless linker described in Blaney, et al., “Traceless solid-phase organic synthesis,” Chem. Rev. 102: 2607-2024 (2002). In some instances, a linker is a traceless linker as described in U.S. Pat. No. 6,821,783.

### Kit/Article of Manufacture

[0348] Disclosed herein, in certain embodiments, are kits and articles of manufacture for use with one or more of the compositions and methods described herein. Such kits include a carrier, package, or container that is compartmentalized to receive one or more containers such as vials, tubes, and the like, each of the container(s) comprising one of the separate elements to be used in a method described herein. Suitable containers include, for example, bottles, vials, syringes, and test tubes. In one embodiment, the containers are formed from a variety of materials such as glass or plastic.

[0349] The articles of manufacture provided herein contain packaging materials. Examples of pharmaceutical packaging materials include, but are not limited to, blister packs, bottles, tubes, bags, containers, bottles, and any packaging material suitable for a selected formulation and intended mode of administration and treatment.

[0350] For example, the container(s) include an anti-Gal3 antibody as disclosed herein, host cells for producing one or more antibodies described herein, and/or vectors comprising nucleic acid molecules that encode the antibodies described herein. Such kits optionally include an identifying description or label or instructions relating to its use in the methods described herein.

[0351] A kit typically includes labels listing contents and/or instructions for use, and package inserts with instructions for use. A set of instructions will also typically be included.

[0352] In one embodiment, a label is on or associated with the container. In one embodiment, a label is on a container when letters, numbers or other characters forming the label are attached, molded or etched into the container itself; a label is associated with a container when it is present within a receptacle or carrier that also holds the container, e.g., as a package insert. In one embodiment, a label is used to indicate that the contents are to be used for a specific therapeutic application. The label also indicates directions for use of the contents, such as in the methods described herein.

[0353] In certain embodiments, the pharmaceutical compositions are presented in a pack or dispenser device which contains one or more unit dosage forms containing a compound provided herein. The pack, for example, contains metal or plastic foil, such as a blister pack. In one embodiment, the pack or dispenser device is accompanied by instructions for administration. In one embodiment, the pack or dispenser is also accompanied with a notice associated with the container in form prescribed by a governmental agency regulating the manufacture, use, or sale of pharmaceuticals, which notice is reflective of approval by the agency of the form of the drug for human or veterinary administration. Such notice, for example, is the labeling approved by the U.S. Food and Drug Administration for prescription drugs, or the approved product insert. In one embodiment, compositions containing a compound provided herein formulated in a compatible pharmaceutical carrier are also prepared, placed in an appropriate container, and labeled for treatment of an indicated condition.

[0354] Some embodiments provided herein are described by way of the following provided numbered arrangements and also provided as possible combinations or overlapping embodiments:

[0355] 1. An anti-Gal3 antibody or binding fragment thereof comprising (1) a heavy chain variable region comprising a V_{H}-CDR1, a V_{H}-CDR2, and a V_{H}-CDR3; and (2) a light chain variable region comprising a V_{L}-CDR1, a V_{L}-CDR2, and a V_{L}-CDR3, wherein

[0356] the V_{H}-CDR1 comprises an amino acid sequence having at least 80%, 81%, 82%, 83%, 84%, 85%, 86%, 87%, 88%, 89%, 90%, 91%, 92%, 93%, 94%, 95%, 96%, 97%, 98%, 99%, or 100% identity to the amino acid sequence of SEQ ID NO: 32, 37, or 66;

[0357] the V_{H}-CDR2 comprises an amino acid sequence having at least 80%, 81%, 82%, 83%, 84%, 85%, 86%, 87%, 88%, 89%, 90%, 91%, 92%, 93%, 94%, 95%, 96%, 97%, 98%, 99%, or 100% identity to the amino acid sequence of SEQ ID NO: 801, 951, 952, 77, or 108;

[0358] the V_{H}-CDR3 comprises an amino acid sequence having at least 80%, 81%, 82%, 83%, 84%, 85%, 86%, 87%, 88%, 89%, 90%, 91%, 92%, 93%, 94%, 95%, 96%, 97%, 98%, 99%, or 100% identity to the amino acid sequence of SEQ ID NO: 953, 954, 802, 118, or 164;

[0359] the V_{L}-CDR1 comprises an amino acid sequence having at least 80%, 81%, 82%, 83%, 84%, 85%, 86%, 87%, 88%, 89%, 90%, 91%, 92%, 93%, 94%, 95%, 96%, 97%, 98%, 99%, or 100% identity to the amino acid sequence of SEQ ID NO: 171, 178, or 215;

[0360] the V_{L}-CDR2 comprises an amino acid sequence having at least 80%, 81%, 82%, 83%, 84%, 85%, 86%, 87%, 88%, 89%, 90%, 91%, 92%, 93%, 94%, 95%, 96%, 97%, 98%, 99%, or 100% identity to the amino acid sequence of SEQ ID NO: 222, 229, or 225; and

[0361] the V_{L}-CDR3 comprises an amino acid sequence having at least 80%, 81%, 82%, 83%, 84%, 85%, 86%, 87%, 88%, 89%, 90%, 91%, 92%, 93%, 94%, 95%, 96%, 97%, 98%, 99%, or 100% identity to the amino acid sequence of SEQ ID NO: 257, 256, or 291.

[0362] 2. The anti-Gal3 antibody or binding fragment thereof of arrangement 1, wherein the heavy chain variable region comprises an amino acid sequence having at least 80%, 81%, 82%, 83%, 84%, 85%, 86%, 87%, 88%, 89%, 90%, 91%, 92%, 93%, 94%, 95%, 96%, 97%, 98%, 99%, or 100% identity to any one of the amino acid sequences of SEQ ID NOs: 806-820, 955-968, 1067-1109, or 1415-1439.

[0363] 3. The anti-Gal3 antibody or binding fragment thereof of arrangement 1 or 2, wherein the light chain variable region comprises an amino acid sequence having at least 80%, 81%, 82%, 83%, 84%, 85%, 86%, 87%, 88%, 89%, 90%, 91%, 92%, 93%, 94%, 95%, 96%, 97%, 98%, 99%, or 100% identity to any one of the amino acid sequences of SEQ ID NOs: 821-835, 969-982, 1110-1152, or 1440-1464.

[0364] 4. The anti-Gal3 antibody or binding fragment thereof of any one of arrangements 1-3, wherein the anti-Gal3 antibody or binding fragment thereof comprises a heavy chain, wherein the heavy chain comprises an amino acid sequence having at least 80%, 81%, 82%, 83%, 84%, 85%, 86%, 87%, 88%, 89%, 90%, 91%, 92%, 93%, 94%, 95%, 96%, 97%, 98%, 99%, or 100% identity to any one of the amino acid sequences of SEQ ID NOs: 836-850, 983-996,1411, 1153-1195, or 1465-1489.

[0365] 5. The anti-Gal3 antibody or binding fragment thereof of any one of arrangements 1-4, wherein the anti-Gal3 antibody or binding fragment thereof comprises a light chain, wherein the light chain comprises an amino acid sequence having at least 80%, 81%, 82%, 83%, 84%, 85%, 86%, 87%, 88%, 89%, 90%, 91%, 92%, 93%, 94%, 95%, 96%, 97%, 98%, 99%, or 100% identity to any one of the amino acid sequences of SEQ ID NOs: 851-865, 997-1010,1196-1238,1412 or 1490-1514.

[0366] 6. A nucleic acid comprising a sequence having at least 80%, 81%, 82%, 83%, 84%, 85%, 86%, 87%, 88%, 89%, 90%, 91%, 92%, 93%, 94%, 95%, 96%, 97%, 98%, 99%, or 100% identity to any one of the nucleic acid sequences of SEQ ID NOs: 866-925, 1011-1066, 1239-1410, or 1515-1614.

[0367] 7. A method of enhancing glucose transporter (GLUT) translocation in a cell, comprising:

[0368] contacting the cell with an anti-Gal3 antibody or binding fragment thereof,

[0369] wherein binding of the anti-Gal3 antibody or binding fragment thereof to Gal3 in the cell inhibits Gal3-mediated blocking of GLUT4 translocation.

[0370] 8. A method of enhancing glucose transporter (GLUT) translocation in a cell, comprising:

[0371] contacting the cell with a preincubated complex of Gal3 and an anti-Gal3 antibody or binding fragment thereof.

[0372] 9. The method of arrangement 8, wherein the preincubated complex of Gal3 and the anti-Gal3 antibody or binding fragment thereof is prepared with Gal3 and the anti-Gal3 antibody or binding fragment thereof at a mass ratio of or of about 1:0.5, 1:0.6, 1:0.7, 1:0.8, 1:0.9, 1:1, 1:1.1, 1:1.2, 1:1.3, 1:1.4, 1:1.5, 1:1.6, 1:1.7, 1:1.8, 1:1.9, 1:2, 1:2.1, 1:2.2, 1:2.3, 1:2.4, or 1:2.5, or any mass ratio within a range defined by any two of the aforementioned mass ratios.

[0373] 10. The method of arrangement 8 or 9, wherein the preincubated complex of Gal3 and the anti-Gal3 antibody or binding fragment is prepared with Gal3 at a concentration of or of about 5, 6, 7, 8, 9, 10, 11, 12, 13, 14, 15, 16, 17, 18, 19, 20, 21, 22, 23, 24, 25, 26, 27, 28, 29, 30, 31, 32, 33, 34, 35, 36, 37, 38, 39, 40, 41, 42, 43, 44, 45, 46, 47, 48, 49, 50, 51, 52, 53, 54, 55, 56, 57, 58, 59, or 60 μg/mL, or any concentration within a range defined by any two of the aforementioned concentrations, and the anti-Gal3 antibody or binding fragment thereof at a concentration of or of about 20, 21, 22, 23, 24, 25, 26, 27, 28, 29, 30, 31, 32, 33, 34, 35, 36, 37, 38, 39, 40, 41, 42, 43, 44, 45, 46, 47, 48, 49, 50, 51, 52, 53, 54, 55, 56, 57, 58, 59, 60, 61, 62, 63, 64, 65, 66, 67, 68, 69, 70, 71, 72, 73, 74, 75, 76, 77, 78, 79, 80, 81, 82, 83, 84, 85, 86, 87, 88, 89, 90, 91, 92, 93, 94, 95, 96, 97, 98, 99, or 100 μg/mL, or any concentration within a range defined by any two of the aforementioned concentrations.

[0374] 11. The method of any one of arrangements 7-10, wherein the glucose transporter is glucose transporter 1 (GLUT1) and/or glucose transporter 4 (GLUT4).

[0375] 12. The method of any one of arrangements 7-11, wherein the method is performed in vitro or in vivo.

[0376] 13. The method of any one of arrangements 7-12, wherein GLUT translocation in the cell is enhanced by at least 50%, 55%, 60%, 65%, 70%, 75%, 80%, 85%, 90%, 95%, 100%, 105%, 110%, 115%, 120%, 125%, 130%, 135%, 140%, 145%, 150%, 155%, 160%, 165%, 170%, 175%, 180%, 185%, 190%, 195%, or 200% after contacting with the anti-Gal3 antibody or binding fragment thereof relative to a cell that is not contacted with the anti-Gal3 antibody or binding fragment thereof.

[0377] 14. The method of any one of arrangements 7-13, wherein the anti-Gal3 antibody or binding fragment thereof selectively binds to an N-terminal domain of Gal3.

[0378] 15. The method of any one of arrangements 7-14, wherein the anti-Gal3 antibody or binding fragment thereof binds to Peptide 1 (SEQ ID NO: 3), Peptide 6 (SEQ ID NO: 8), or Peptide 7 (SEQ ID NO:9), or any combination thereof.

[0379] 16. The method of any one of arrangements 7-15, wherein the anti-Gal3 antibody or binding fragment thereof comprises (1) a heavy chain variable region comprising a V_{H}-CDR1, a V_{H}-CDR2, and a V_{H}-CDR3; and (2) a light chain variable region comprising a V_{L}-CDR1, a V_{L}-CDR2, and a V_{L}-CDR3, wherein

[0380] the V_{H}-CDR1 comprises an amino acid sequence having at least 80%, 81%, 82%, 83%, 84%, 85%, 86%, 87%, 88%, 89%, 90%, 91%, 92%, 93%, 94%, 95%, 96%, 97%, 98%, 99%, or 100% identity to any one of the amino acid sequences of SEQ ID NOs: 27-70;

[0381] the V_{H}-CDR2 comprises an amino acid sequence having at least 80%, 81%, 82%, 83%, 84%, 85%, 86%, 87%, 88%, 89%, 90%, 91%, 92%, 93%, 94%, 95%, 96%, 97%, 98%, 99%, or 100% identity to any one of the amino acid sequences of SEQ ID NOs: 71-111, 801, 951, 952;

[0382] the V_{H}-CDR3 comprises an amino acid sequence having at least 80%, 81%, 82%, 83%, 84%, 85%, 86%, 87%, 88%, 89%, 90%, 91%, 92%, 93%, 94%, 95%, 96%, 97%, 98%, 99%, or 100% identity to any one of the amino acid sequences of SEQ ID NOs: 112-169, 802, 953, 954;

[0383] the V_{L}-CDR1 comprises an amino acid sequence having at least 80%, 81%, 82%, 83%, 84%, 85%, 86%, 87%, 88%, 89%, 90%, 91%, 92%, 93%, 94%, 95%, 96%, 97%, 98%, 99%, or 100% identity to any one of the amino acid sequences of SEQ ID NOs: 170-220;

[0384] the V_{L}-CDR2 comprises an amino acid sequence having at least 80%, 81%, 82%, 83%, 84%, 85%, 86%, 87%, 88%, 89%, 90%, 91%, 92%, 93%, 94%, 95%, 96%, 97%, 98%, 99%, or 100% identity to any one of the amino acid sequences of SEQ ID NOs: 221-247; and

[0385] the V_{L}-CDR3 comprises an amino acid sequence having at least 80%, 81%, 82%, 83%, 84%, 85%, 86%, 87%, 88%, 89%, 90%, 91%, 92%, 93%, 94%, 95%, 96%, 97%, 98%, 99%, or 100% identity to any one of the amino acid sequences of SEQ ID NOs: 248-296.

[0386] 17. The method of arrangement 16, wherein the anti-Gal3 antibody or binding fragment thereof comprises a combination of the V_{H}-CDR1, V_{H}-CDR2, V_{H}-CDR3, V_{L}-CDR1, V_{L}-CDR2, and V_{L}-CDR3 as illustrated in FIG. 23.

[0387] 18. The method of arrangement 16 or 17, wherein the heavy chain variable region comprises a sequence having at least 80%, 81%, 82%, 83%, 84%, 85%, 86%, 87%, 88%, 89%, 90%, 91%, 92%, 93%, 94%, 95%, 96%, 97%, 98%, or 99% identity to the sequence selected from SEQ ID NOs: 297-373, 803, 806-820, 955-968, 1067-1109, 1415-1439.

[0388] 19. The method of any one of arrangements 16-18, wherein the light chain variable region comprises a sequence having at least 80%, 81%, 82%, 83%, 84%, 85%, 86%, 87%, 88%, 89%, 90%, 91%, 92%, 93%, 94%, 95%, 96%, 97%, 98%, or 99% identity to the sequence selected from SEQ ID NOs: 374-447, 821-835, 969-982, 1110-1152, 1440-1464.

[0389] 20. The method of any one of arrangements 7-19, wherein the anti-Gal3 antibody or binding fragment thereof comprises a heavy chain, wherein the heavy chain comprises a sequence having at least 80%, 81%, 82%, 83%, 84%, 85%, 86%, 87%, 88%, 89%, 90%, 91%, 92%, 93%, 94%, 95%, 96%, 97%, 98%, or 99% identity to the sequence selected from SEQ ID NOs: 448-494, 804, 836-850, 983-996, 1153-1195, 1411, 1465-1489.

[0390] 21. The method of any one of arrangements 7-20, wherein the anti-Gal3 antibody or binding fragment thereof comprises a light chain, wherein the light chain comprises a sequence having at least 80%, 81%, 82%, 83%, 84%, 85%, 86%, 87%, 88%, 89%, 90%, 91%, 92%, 93%, 94%, 95%, 96%, 97%, 98%, or 99% identity to the sequence selected from SEQ ID NOs: 495-538, 805, 851-865, 997-1010, 1196-1238, 1412, 1490-1514.

[0391] 22. The method of any one of arrangements 7-21, wherein the anti-Gal3 antibody or binding fragment thereof is selected from the group consisting of: TB001, TB006, 12G5.D7, 13A12.2E5, 14H10.2C9, 15F10.2D6, 19B5.2E6, 20D11.2C6, 20H5.A3, 23H9.2E4, 2D10.2B2, 3B11.2G2, 7D8.2D8, mIMT001, 4A11.2B5, 4A11.H1L1, 4A11.H4L2, 4G2.2G6, 6B3.2D3, 6H6.2D6, 9H2.2H10, 13G4.2F8, 13H12.2F8, 15G7.2A7, 19D9.2E5, 23B10.2B12, 24D12.2H9, F846C.1B2, F846C.1F5, F846C.1H12, F846C.1H5, F846C.2H3, F846TC.14A2, F846TC.14E4, F846TC.16B5, F846TC.7F10, F847C.10B9, F847C.11B1, F847C.12F12, F847C.26F5, F847C.4B10, F849C.8D10, F849C.8H3, 846.2B11, 846.4D5, 846T.1H2, 847.14H4, 846.2D4, 846.2F11, 846T.10B1, 846T.2E3, 846T.4C9, 846T.4E11, 846T.4F5, 846T.8D1, 847.10C9, 847.11D6, 847.15D12, 847.15F9, 847.15H11, 847.20H7, 847.21B11, 847.27B9, 847.28D1, 847.2B8, 847.3B3, 849.1D2, 849.2D7, 849.2F12, 849.4B2, 849.4F12, 849.4F2, 849.5C2, 849.8D12, F847C.21H6, 849.5H1, 847.23F11, 847.16D10, 847.13E2-mH0mL1, 847.13E2-mH0mL2, 847.12C4, 847.4D3, 2D10-VH0-VL0, 2D10-hVH4-HVL1, 2D10-hVH4-HVL2, 2D10-hVH4-HVL3, 2D10-hVH4-HVL4, 2D10-hVH3-HVL1, 2D10-hVH3-HVL2, 2D10-hVH3-HVL3, 2D10-hVH3-HVL4, 20H5.A3-VH3VL1, 20H5.A3-VH3VL3, 20H5.A3-VH4VL1, 20H5.A3-VH5VL1, 20H5.A3-VH5VL3, 20H5.A3-VH6VL1, 20H5.A3-VH6VL3, 2D10.2B2-v2, 2D10-VH0-NDA-VL0, 2D10-VH0-QDT-VL0, 2D10-VH0-SDT-VL0, 2D10-VH0-v1-QDT, 2D10-VH0-v2-QDT, 2D10-hVH1-hVL1, 2D10-hVH1-hVL2, 2D10-hVH1-hVL3, 2D10-hVH1-hVL4, 2D10-hVH2-hVL1, 2D10-hVH2-hVL2, 2D10-hVH2-hVL3, 2D10-hVH2-hVL4, 20H5.A3-hIgG4(S228P), 20H5.A3-hIgG4(S228P)-mv2, 798-9.20H5.A3-mH0mL1, 798-9.20H5.A3-mH1mL0, 798-9.20H5.A3-mH1mL1, 798-9.20H5.A3-mH2mL0, 798-9.20H5.A3-mH2mL1, 20H5.A3-VH1VL1, 20H5.A3-VH1VL2, 20H5.A3-VH1VL3, 20H5.A3-VH1VL4, 20H5.A3-VH1VL5, 20H5.A3-VH1VL6, 20H5.A3-VH2VL3, 20H5.A3-VH2VL4, 20H5.A3-VH2VL5, 20H5.A3-VH2VL6, 20H5.A3-VH3VL5, 20H5.A3-VH3VL6, 20H5.A3-VH4VL3, 20H5.A3-VH4VL4, 20H5.A3-VH4VL5, 20H5.A3-VH4VL6, 20H5.A3-VH5VL5, 20H5.A3-VH5VL6, 20H5.A3-VH6VL4, 20H5.A3-VH6VL5, 20H5.A3-VH6VL6, 20H5.A3-VH7VL1, 20H5.A3-VH7VL2, 20H5.A3-VH7VL3, 20H5.A3-VH7VL4, 20H5.A3-VH7VL5, 20H5.A3-VH7VL6, 20H5.A3_hVH3VL1-hIgG1 (KEMv2), 20H5.A3_hVH3VL1-hIgG1 (LALAPGv2), 20H5.A3_hVH3VL1-hIgG1 (REM), 20H5.A3_hVH5VL1-hIgG1 (KEMv2), 20H5.A3_hVH5VL1-hIgG1 (LALAPGv2), 20H5.A3_hVH5VL1-hIgG1 (REM), 20H5.A3_hVH6VL1-hIgG1 (KEMv2), 20H5.A3_hVH6VL1-hIgG1 (LALAPGv2), 20H5.A3_hVH6VL1-hIgG1 (REM), 21H6-H0L0, 21H6-H1L1, 21H6-H1L2, 21H6-H1L3, 21H6-H1L4, 21H6-H2L1, 21H6-H2L2, 21H6-H2L3, 21H6-H2L4, 21H6-H3L1, 21H6-H3L2, 21H6-H3L3, 21H6-H3L4, 21H6-H4L1, 21H6-H4L2, 21H6-H4L3, 21H6-H4L4, 21H6-H5L1, 21H6-H5L2, 21H6-H5L3, 21H6-H5L4, 21H6-H6L1, 21H6-H6L2, 21H6-H6L3, 21H6-H6L4, or binding fragment thereof.

[0392] 23 The method of any one of arrangements 7-22, wherein the anti-Gal3 antibody or binding fragment thereof is selected from the group consisting of: 20H5.A3, 20H5.A3-VH3VL1, 20H5.A3-VH3VL3, 20H5.A3-VH4VL1, 20H5.A3-VH5VL1, 20H5.A3-VH5VL3, 20H5.A3-VH6VL1, 20H5.A3-VH6VL3, or binding fragment thereof.

[0393] 24. The method of any one of arrangements 7-22, wherein the anti-Gal3 antibody or binding fragment thereof is selected from the group consisting of: 2D10-VH0-VL0, 2D10-hVH4-HVL1, 2D10-hVH4-HVL2, 2D10-hVH4-HVL3, 2D10-hVH4-HVL4, 2D10-hVH3-HVL1, 2D10-hVH3-HVL2, 2D10-hVH3-HVL3, 2D10-hVH3-HVL4, or binding fragment thereof.

[0394] 25. The method of any one of arrangements 7-22, wherein the anti-Gal3 antibody or binding fragment thereof is selected from the group consisting of: 21H6-H0L0, 21H6-H1L1, 21H6-H1L2, 21H6-H1L3, 21H6-H1L4, 21H6-H2L1, 21H6-H2L2, 21H6-H2L3, 21H6-H2L4, 21H6-H3L1, 21H6-H3L2, 21H6-H3L3, 21H6-H3L4, 21H6-H4L1, 21H6-H4L2, 21H6-H4L3, 21H6-H4L4, 21H6-H5L1, 21H6-H5L2, 21H6-H5L3, 21H6-H5L4, 21H6-H6L1, 21H6-H6L2, 21H6-H6L3, 21H6-H6L4, or binding fragment thereof.

[0395] 26. A method of improving insulin sensitivity in a subject in need thereof, comprising:

[0396] administering to the subject an anti-Gal3 antibody or binding fragment thereof,

[0397] wherein binding of the anti-Gal3 antibody or binding fragment thereof to Gal3 in the subject inhibits Gal3-mediated blocking of glucose transporter (GLUT) translocation in the subject, thereby improving insulin sensitivity in the subject.

[0398] 27. A method of improving insulin sensitivity in a subject in need thereof, comprising:

[0399] administering to the subject a preincubated complex of Gal3 and an anti-Gal3 antibody or binding fragment thereof, thereby improving insulin sensitivity in the subject.

[0400] 28. The method of arrangement 27, wherein the preincubated complex of Gal3 and the anti-Gal3 antibody or binding fragment thereof is prepared with Gal3 and the anti-Gal3 antibody or binding fragment thereof at a mass ratio of or of about 1:0.5, 1:0.6, 1:0.7, 1:0.8, 1:0.9, 1:1, 1:1.1, 1:1.2, 1:1.3, 1:1.4, 1:1.5, 1:1.6, 1:1.7, 1:1.8, 1:1.9, 1:2, 1:2.1, 1:2.2, 1:2.3, 1:2.4, or 1:2.5, or any mass ratio within a range defined by any two of the aforementioned mass ratios.

[0401] 29. The method of arrangement 27 or 28, wherein the preincubated complex of Gal3 and the anti-Gal3 antibody or binding fragment is prepared with Gal3 at a concentration of or of about 5, 6, 7, 8, 9, 10, 11, 12, 13, 14, 15, 16, 17, 18, 19, 20, 21, 22, 23, 24, 25, 26, 27, 28, 29, 30, 31, 32, 33, 34, 35, 36, 37, 38, 39, 40, 41, 42, 43, 44, 45, 46, 47, 48, 49, 50, 51, 52, 53, 54, 55, 56, 57, 58, 59, or 60 μg/mL, or any concentration within a range defined by any two of the aforementioned concentrations, and the anti-Gal3 antibody or binding fragment thereof at a concentration of or of about 20, 21, 22, 23, 24, 25, 26, 27, 28, 29, 30, 31, 32, 33, 34, 35, 36, 37, 38, 39, 40, 41, 42, 43, 44, 45, 46, 47, 48, 49, 50, 51, 52, 53, 54, 55, 56, 57, 58, 59, 60, 61, 62, 63, 64, 65, 66, 67, 68, 69, 70, 71, 72, 73, 74, 75, 76, 77, 78, 79, 80, 81, 82, 83, 84, 85, 86, 87, 88, 89, 90, 91, 92, 93, 94, 95, 96, 97, 98, 99, or 100 μg/mL, or any concentration within a range defined by any two of the aforementioned concentrations.

[0402] 30. The method of any one of arrangements 26-29, wherein the GLUT is glucose transporter 1 (GLUT1) and/or glucose transporter 4 (GLUT4).

[0403] 31. The method of any one of arrangements 26-30, further comprising identifying the subject as needing improvement in insulin sensitivity prior to the administering step.

[0404] 32. The method of any one of arrangements 26-31, further comprising detecting an improvement in insulin sensitivity in the subject following the administering step.

[0405] 33. The method of arrangement 32, wherein detecting the improvement in insulin sensitivity in the subject is done by measuring blood sugar levels, measuring blood insulin levels, glucose tolerance testing, or hyperinsulinemic euglycemic clamp.

[0406] 34. The method of arrangement 32 or 33, wherein the insulin sensitivity in the subject is improved by at least 50%, 55%, 60%, 65%, 70%, 75%, 80%, 85%, 90%, 95%, 100%, 105%, 110%, 115%, 120%, 125%, 130%, 135%, 140%, 145%, 150%, 155%, 160%, 165%, 170%, 175%, 180%, 185%, 190%, 195%, or 200% relative to the insulin sensitivity of the subject prior to the administering step.

[0407] 35. The method of any one of arrangements 26-34, wherein the anti-Gal3 antibody or binding fragment thereof selectively binds to an N-terminal domain of Gal3.

[0408] 36. The method of any one of arrangements 26-35, wherein the anti-Gal3 antibody or binding fragment thereof binds to Peptide 1 (SEQ ID NO: 3), Peptide 6 (SEQ ID NO: 8), or Peptide 7 (SEQ ID NO:9), or any combination thereof.

[0409] 37. The method of any one of arrangements 26-36, wherein the anti-Gal3 antibody or binding fragment thereof comprises (1) a heavy chain variable region comprising a V_{H}-CDR1, a V_{H}-CDR2, and a V_{H}-CDR3; and (2) a light chain variable region comprising a V_{L}-CDR1, a V_{L}-CDR2, and a V_{L}-CDR3, wherein

[0410] the V_{H}-CDR1 comprises an amino acid sequence having at least 80%, 81%, 82%, 83%, 84%, 85%, 86%, 87%, 88%, 89%, 90%, 91%, 92%, 93%, 94%, 95%, 96%, 97%, 98%, 99%, or 100% identity to any one of the amino acid sequences of SEQ ID NOs: 27-70;

[0411] the V_{H}-CDR2 comprises an amino acid sequence having at least 80%, 81%, 82%, 83%, 84%, 85%, 86%, 87%, 88%, 89%, 90%, 91%, 92%, 93%, 94%, 95%, 96%, 97%, 98%, 99%, or 100% identity to any one of the amino acid sequences of SEQ ID NOs: 71-111, 801, 951, 952;

[0412] the V_{H}-CDR3 comprises an amino acid sequence having at least 80%, 81%, 82%, 83%, 84%, 85%, 86%, 87%, 88%, 89%, 90%, 91%, 92%, 93%, 94%, 95%, 96%, 97%, 98%, 99%, or 100% identity to any one of the amino acid sequences of SEQ ID NOs: 112-169, 802, 953, 954;

[0413] the V_{L}-CDR1 comprises an amino acid sequence having at least 80%, 81%, 82%, 83%, 84%, 85%, 86%, 87%, 88%, 89%, 90%, 91%, 92%, 93%, 94%, 95%, 96%, 97%, 98%, 99%, or 100% identity to any one of the amino acid sequences of SEQ ID NOs: 170-220;

[0414] the V_{L}-CDR2 comprises an amino acid sequence having at least 80%, 81%, 82%, 83%, 84%, 85%, 86%, 87%, 88%, 89%, 90%, 91%, 92%, 93%, 94%, 95%, 96%, 97%, 98%, 99%, or 100% identity to any one of the amino acid sequences of SEQ ID NOs: 221-247; and

[0415] the V_{L}-CDR3 comprises an amino acid sequence having at least 80%, 81%, 82%, 83%, 84%, 85%, 86%, 87%, 88%, 89%, 90%, 91%, 92%, 93%, 94%, 95%, 96%, 97%, 98%, 99%, or 100% identity to any one of the amino acid sequences of SEQ ID NOs: 248-296.

[0416] 38. The method of arrangement 37, wherein the anti-Gal3 antibody or binding fragment thereof comprises a combination of the V_{H}-CDR1, V_{H}-CDR2, V_{H}-CDR3, V_{L}-CDR1, V_{L}-CDR2, and V_{L}-CDR3 as illustrated in FIG. 23.

[0417] 39. The method of arrangement 37 or 38, wherein the heavy chain variable region comprises a sequence having at least 80%, 81%, 82%, 83%, 84%, 85%, 86%, 87%, 88%, 89%, 90%, 91%, 92%, 93%, 94%, 95%, 96%, 97%, 98%, or 99% identity to the sequence selected from SEQ ID NOs: 297-373, 803, 806-820, 955-968, 1067-1109, 1415-1439.

[0418] 40. The method of any one of arrangements 37-39, wherein the light chain variable region comprises a sequence having at least 80%, 81%, 82%, 83%, 84%, 85%, 86%, 87%, 88%, 89%, 90%, 91%, 92%, 93%, 94%, 95%, 96%, 97%, 98%, or 99% identity to the sequence selected from SEQ ID NOs: 374-447, 821-835, 969-982, 1110-1152, 1440-1464.

[0419] 41. The method of any one of arrangements 26-40, wherein the anti-Gal3 antibody or binding fragment thereof comprises a heavy chain, wherein the heavy chain comprises a sequence having at least 80%, 81%, 82%, 83%, 84%, 85%, 86%, 87%, 88%, 89%, 90%, 91%, 92%, 93%, 94%, 95%, 96%, 97%, 98%, or 99% identity to the sequence selected from SEQ ID NOs: 448-494, 804, 836-850, 983-996, 1153-1195, 1411, 1465-1489.

[0420] 42. The method of any one of arrangements 26-41, wherein the anti-Gal3 antibody or binding fragment thereof comprises a light chain, wherein the light chain comprises a sequence having at least 80%, 81%, 82%, 83%, 84%, 85%, 86%, 87%, 88%, 89%, 90%, 91%, 92%, 93%, 94%, 95%, 96%, 97%, 98%, or 99% identity to the sequence selected from SEQ ID NOs: 495-538, 805, 851-865, 997-1010, 1196-1238, 1412, 1490-1514.

[0421] 43. The method of any one of arrangements 26-42, wherein the anti-Gal3 antibody or binding fragment thereof is selected from the group consisting of: TB001, TB006, 12G5.D7, 13A12.2E5, 14H10.2C9, 15F10.2D6, 19B5.2E6, 20D11.2C6, 20H5.A3, 23H9.2E4, 2D10.2B2, 3B11.2G2, 7D8.2D8, mIMT001, 4A11.2B5, 4A11.H1L1, 4A11.H4L2, 4G2.2G6, 6B3.2D3, 6H6.2D6, 9H2.2H10, 13G4.2F8, 13H12.2F8, 15G7.2A7, 19D9.2E5, 23B10.2B12, 24D12.2H9, F846C.1B2, F846C.1F5, F846C.1H12, F846C.1H5, F846C.2H3, F846TC.14A2, F846TC.14E4, F846TC.16B5, F846TC.7F10, F847C.10B9, F847C.11B1, F847C.12F12, F847C.26F5, F847C.4B10, F849C.8D10, F849C.8H3, 846.2B11, 846.4D5, 846T.1H2, 847.14H4, 846.2D4, 846.2F11, 846T.10B1, 846T.2E3, 846T.4C9, 846T.4E11, 846T.4F5, 846T.8D1, 847.10C9, 847.11D6, 847.15D12, 847.15F9, 847.15H11, 847.20H7, 847.21B11, 847.27B9, 847.28D1, 847.2B8, 847.3B3, 849.1D2, 849.2D7, 849.2F12, 849.4B2, 849.4F12, 849.4F2, 849.5C2, 849.8D12, F847C.21H6, 849.5H1, 847.23F11, 847.16D10, 847.13E2-mH0mL1, 847.13E2-mH0mL2, 847.12C4, 847.4D3, 2D10-VH0-VL0, 2D10-hVH4-HVL1, 2D10-hVH4-HVL2, 2D10-hVH4-HVL3, 2D10-hVH4-HVL4, 2D10-hVH3-HVL1, 2D10-hVH3-HVL2, 2D10-hVH3-HVL3, 2D10-hVH3-HVL4, 20H5.A3-VH3VL1, 20H5.A3-VH3VL3, 20H5.A3-VH4VL1, 20H5.A3-VH5VL1, 20H5.A3-VH5VL3, 20H5.A3-VH6VL1, 20H5.A3-VH6VL3, 2D10.2B2-v2, 2D10-VH0-NDA-VL0, 2D10-VH0-QDT-VL0, 2D10-VH0-SDT-VL0, 2D10-VH0-v1-QDT, 2D10-VH0-v2-QDT, 2D10-hVH1-hVL1, 2D10-hVH1-hVL2, 2D10-hVH1-hVL3, 2D10-hVH1-hVL4, 2D10-hVH2-hVL1, 2D10-hVH2-hVL2, 2D10-hVH2-hVL3, 2D10-hVH2-hVL4, 20H5.A3-hIgG4(S228P), 20H5.A3-hIgG4(S228P)-mv2, 798-9.20H5.A3-mH0mL1, 798-9.20H5.A3-mH1mL0, 798-9.20H5.A3-mH1mL1, 798-9.20H5.A3-mH2mL0, 798-9.20H5.A3-mH2mL1, 20H5.A3-VH1VL1, 20H5.A3-VH1VL2, 20H5.A3-VH1VL3, 20H5.A3-VH1VL4, 20H5.A3-VH1VL5, 20H5.A3-VH1VL6, 20H5.A3-VH2VL3, 20H5.A3-VH2VL4, 20H5.A3-VH2VL5, 20H5.A3-VH2VL6, 20H5.A3-VH3VL5, 20H5.A3-VH3VL6, 20H5.A3-VH4VL3, 20H5.A3-VH4VL4, 20H5.A3-VH4VL5, 20H5.A3-VH4VL6, 20H5.A3-VH5VL5, 20H5.A3-VH5VL6, 20H5.A3-VH6VL4, 20H5.A3-VH6VL5, 20H5.A3-VH6VL6, 20H5.A3-VH7VL1, 20H5.A3-VH7VL2, 20H5.A3-VH7VL3, 20H5.A3-VH7VL4, 20H5.A3-VH7VL5, 20H5.A3-VH7VL6, 20H5.A3_hVH3VL1-hIgG1 (KEMv2), 20H5.A3_hVH3VL1-hIgG1 (LALAPGv2), 20H5.A3_hVH3VL1-hIgG1 (REM), 20H5.A3_hVH5VL1-hIgG1 (KEMv2), 20H5.A3_hVH5VL1-hIgG1 (LALAPGv2), 20H5.A3_hVH5VL1-hIgG1 (REM), 20H5.A3_hVH6VL1-hIgG1 (KEMv2), 20H5.A3_hVH6VL1-hIgG1 (LALAPGv2), 20H5.A3_hVH6VL1-hIgG1 (REM), 21H6-H0L0, 21H6-H1L1, 21H6-H1L2, 21H6-H1L3, 21H6-H1L4, 21H6-H2L1, 21H6-H2L2, 21H6-H2L3, 21H6-H2L4, 21H6-H3L1, 21H6-H3L2, 21H6-H3L3, 21H6-H3L4, 21H6-H4L1, 21H6-H4L2, 21H6-H4L3, 21H6-H4L4, 21H6-H5L1, 21H6-H5L2, 21H6-H5L3, 21H6-H5L4, 21H6-H6L1, 21H6-H6L2, 21H6-H6L3, 21H6-H6L4, or binding fragment thereof.

[0422] 44. The method of any one of arrangements 26-43, wherein the anti-Gal3 antibody or binding fragment thereof is selected from the group consisting of: 20H5.A3, 20H5.A3-VH3VL1, 20H5.A3-VH3VL3, 20H5.A3-VH4VL1, 20H5.A3-VH5VL1, 20H5.A3-VH5VL3, 20H5.A3-VH6VL1, 20H5.A3-VH6VL3, or binding fragment thereof.

[0423] 45. The method of any one of arrangements 26-43, wherein the anti-Gal3 antibody or binding fragment thereof is selected from the group consisting of: 2D10-VH0-VL0, 2D10-hVH4-HVL1, 2D10-hVH4-HVL2, 2D10-hVH4-HVL3, 2D10-hVH4-HVL4, 2D10-hVH3-HVL1, 2D10-hVH3-HVL2, 2D10-hVH3-HVL3, 2D10-hVH3-HVL4, or binding fragment thereof.

[0424] 46. The method of any one of arrangements 26-43, wherein the anti-Gal3 antibody or binding fragment thereof is selected from the group consisting of: 21H6-H0L0, 21H6-H1L1, 21H6-H1L2, 21H6-H1L3, 21H6-H1L4, 21H6-H2L1, 21H6-H2L2, 21H6-H2L3, 21H6-H2L4, 21H6-H3L1, 21H6-H3L2, 21H6-H3L3, 21H6-H3L4, 21H6-H4L1, 21H6-H4L2, 21H6-H4L3, 21H6-H4L4, 21H6-H5L1, 21H6-H5L2, 21H6-H5L3, 21H6-H5L4, 21H6-H6L1, 21H6-H6L2, 21H6-H6L3, 21H6-H6L4, or binding fragment thereof.

[0425] 47. A method of treating a disease associated with insulin resistance in a subject in need thereof, comprising:

[0426] administering to the subject an anti-Gal3 antibody or binding fragment thereof,

[0427] thereby treating the disease associated with insulin resistance in the subject.

[0428] 48. A method of treating a disease associated with insulin resistance in a subject in need thereof, comprising:

[0429] administering to a subject a preincubated complex of Gal3 and an anti-Gal3 antibody or binding fragment thereof, thereby treating the disease associated with insulin resistance in the subject.

[0430] 49. The method of arrangement 48, wherein the preincubated complex of Gal3 and the anti-Gal3 antibody or binding fragment thereof is prepared with Gal3 and the anti-Gal3 antibody or binding fragment thereof at a mass ratio of or of about 1:0.5, 1:0.6, 1:0.7, 1:0.8, 1:0.9, 1:1, 1:1.1, 1:1.2, 1:1.3, 1:1.4, 1:1.5, 1:1.6, 1:1.7, 1:1.8, 1:1.9, 1:2, 1:2.1, 1:2.2, 1:2.3, 1:2.4, or 1:2.5, or any mass ratio within a range defined by any two of the aforementioned mass ratios.

[0431] 50. The method of arrangement 48 or 49, wherein the preincubated complex of Gal3 and the anti-Gal3 antibody or binding fragment is prepared with Gal3 at a concentration of or of about 5, 6, 7, 8, 9, 10, 11, 12, 13, 14, 15, 16, 17, 18, 19, 20, 21, 22, 23, 24, 25, 26, 27, 28, 29, 30, 31, 32, 33, 34, 35, 36, 37, 38, 39, 40, 41, 42, 43, 44, 45, 46, 47, 48, 49, 50, 51, 52, 53, 54, 55, 56, 57, 58, 59, or 60 μg/mL, or any concentration within a range defined by any two of the aforementioned concentrations, and the anti-Gal3 antibody or binding fragment thereof at a concentration of or of about 20, 21, 22, 23, 24, 25, 26, 27, 28, 29, 30, 31, 32, 33, 34, 35, 36, 37, 38, 39, 40, 41, 42, 43, 44, 45, 46, 47, 48, 49, 50, 51, 52, 53, 54, 55, 56, 57, 58, 59, 60, 61, 62, 63, 64, 65, 66, 67, 68, 69, 70, 71, 72, 73, 74, 75, 76, 77, 78, 79, 80, 81, 82, 83, 84, 85, 86, 87, 88, 89, 90, 91, 92, 93, 94, 95, 96, 97, 98, 99, or 100 μg/mL, or any concentration within a range defined by any two of the aforementioned concentrations.

[0432] 51. The method of any one of arrangements 47-50, wherein the disease associated with insulin resistance comprises diabetes mellitus, chronic hyperinsulinemia, dysmetabolic syndrome, type A insulin resistance syndrome, type B insulin resistance syndrome, gestational diabetes, acanthosis nigricans, polycystic ovary syndrome (PCOS), obesity, muscle wasting, cardiovascular disease, cardiac hypertrophy, myocardial ischemia, hypertension, pancreatic cancer associated diabetes (PCDM) or cancer.

[0433] 52. The method of any one of arrangements 47-51, further comprising identifying the subject as needing treatment of the disease associated with insulin resistance prior to the administering step.

[0434] 53. The method of any one of arrangements 47-52, further comprising detecting an improvement in the disease associated with insulin resistance following the administering step.

[0435] 54. The method of arrangement 53, wherein detecting an improvement in the disease associated with insulin resistance comprises detecting an improvement in insulin sensitivity in the subject.

[0436] 55. The method of arrangement 54, wherein detecting the improvement in insulin sensitivity in the subject is done by measuring blood sugar levels, measuring blood insulin levels, glucose tolerance testing, or hyperinsulinemic euglycemic clamp.

[0437] 56. The method of arrangement 54 or 55, wherein the insulin sensitivity in the subject is improved by at least 50%, 55%, 60%, 65%, 70%, 75%, 80%, 85%, 90%, 95%, 100%, 105%, 110%, 115%, 120%, 125%, 130%, 135%, 140%, 145%, 150%, 155%, 160%, 165%, 170%, 175%, 180%, 185%, 190%, 195%, or 200% relative to the insulin sensitivity of the subject prior to the administering step.

[0438] 57. The method of any one of arrangements 47-56, wherein the anti-Gal3 antibody or binding fragment thereof selectively binds to an N-terminal domain of Gal3.

[0439] 58. The method of any one of arrangements 47-57, wherein the anti-Gal3 antibody or binding fragment thereof binds to Peptide 1 (SEQ ID NO: 3), Peptide 6 (SEQ ID NO: 8), or Peptide 7 (SEQ ID NO:9), or any combination thereof.

[0440] 59. The method of any one of arrangements 47-58, wherein the anti-Gal3 antibody or binding fragment thereof comprises (1) a heavy chain variable region comprising a V_{H}-CDR1, a V_{H}-CDR2, and a V_{H}-CDR3; and (2) a light chain variable region comprising a V_{L}-CDR1, a V_{L}-CDR2, and a V_{L}-CDR3, wherein

[0441] the V_{H}-CDR1 comprises an amino acid sequence having at least 80%, 81%, 82%, 83%, 84%, 85%, 86%, 87%, 88%, 89%, 90%, 91%, 92%, 93%, 94%, 95%, 96%, 97%, 98%, 99%, or 100% identity to any one of the amino acid sequences of SEQ ID NOs: 27-70;

[0442] the V_{H}-CDR2 comprises an amino acid sequence having at least 80%, 81%, 82%, 83%, 84%, 85%, 86%, 87%, 88%, 89%, 90%, 91%, 92%, 93%, 94%, 95%, 96%, 97%, 98%, 99%, or 100% identity to any one of the amino acid sequences of SEQ ID NOs: 71-111, 801, 951, 952;

[0443] the V_{H}-CDR3 comprises an amino acid sequence having at least 80%, 81%, 82%, 83%, 84%, 85%, 86%, 87%, 88%, 89%, 90%, 91%, 92%, 93%, 94%, 95%, 96%, 97%, 98%, 99%, or 100% identity to any one of the amino acid sequences of SEQ ID NOs: 112-169, 802, 953, 954;

[0444] the V_{L}-CDR1 comprises an amino acid sequence having at least 80%, 81%, 82%, 83%, 84%, 85%, 86%, 87%, 88%, 89%, 90%, 91%, 92%, 93%, 94%, 95%, 96%, 97%, 98%, 99%, or 100% identity to any one of the amino acid sequences of SEQ ID NOs: 170-220;

[0445] the V_{L}-CDR2 comprises an amino acid sequence having at least 80%, 81%, 82%, 83%, 84%, 85%, 86%, 87%, 88%, 89%, 90%, 91%, 92%, 93%, 94%, 95%, 96%, 97%, 98%, 99%, or 100% identity to any one of the amino acid sequences of SEQ ID NOs: 221-247; and

[0446] the V_{L}-CDR3 comprises an amino acid sequence having at least 80%, 81%, 82%, 83%, 84%, 85%, 86%, 87%, 88%, 89%, 90%, 91%, 92%, 93%, 94%, 95%, 96%, 97%, 98%, 99%, or 100% identity to any one of the amino acid sequences of SEQ ID NOs: 248-296.

[0447] 60. The method of arrangement 59, wherein the anti-Gal3 antibody or binding fragment thereof comprises a combination of the V_{H}-CDR1, V_{H}-CDR2, V_{H}-CDR3, V_{L}-CDR1, V_{L}-CDR2, and V_{L}-CDR3 as illustrated in FIG. 23.

[0448] 61. The method of arrangement 59 or 60, wherein the heavy chain variable region comprises a sequence having at least 80%, 81%, 82%, 83%, 84%, 85%, 86%, 87%, 88%, 89%, 90%, 91%, 92%, 93%, 94%, 95%, 96%, 97%, 98%, or 99% identity to the sequence selected from SEQ ID NOs: 297-373, 803, 806-820, 955-968, 1067-1109, 1415-1439.

[0449] 62. The method of any one of arrangements 59-61, wherein the light chain variable region comprises a sequence having at least 80%, 81%, 82%, 83%, 84%, 85%, 86%, 87%, 88%, 89%, 90%, 91%, 92%, 93%, 94%, 95%, 96%, 97%, 98%, or 99% identity to the sequence selected from SEQ ID NOs: 374-447, 821-835, 969-982, 1110-1152, 1440-1464.

[0450] 63. The method of any one of arrangements 47-62, wherein the anti-Gal3 antibody or binding fragment thereof comprises a heavy chain, wherein the heavy chain comprises a sequence having at least 80%, 81%, 82%, 83%, 84%, 85%, 86%, 87%, 88%, 89%, 90%, 91%, 92%, 93%, 94%, 95%, 96%, 97%, 98%, or 99% identity to the sequence selected from SEQ ID NOs: 448-494, 804, 836-850, 983-996, 1153-1195, 1411, 1465-1489.

[0451] 64. The method of any one of arrangements 47-63, wherein the anti-Gal3 antibody or binding fragment thereof comprises a light chain, wherein the light chain comprises a sequence having at least 80%, 81%, 82%, 83%, 84%, 85%, 86%, 87%, 88%, 89%, 90%, 91%, 92%, 93%, 94%, 95%, 96%, 97%, 98%, or 99% identity to the sequence selected from SEQ ID NOs: 495-538, 805, 851-865, 997-1010, 1196-1238, 1412, 1490-1514.

[0452] 65. The method of any one of arrangements 47-64, wherein the anti-Gal3 antibody or binding fragment thereof is selected from the group consisting of: TB001, TB006, 12G5.D7, 13A12.2E5, 14H10.2C9, 15F10.2D6, 19B5.2E6, 20D11.2C6, 20H5.A3, 23H9.2E4, 2D10.2B2, 3B11.2G2, 7D8.2D8, mIMT001, 4A11.2B5, 4A11.H1L1, 4A11.H4L2, 4G2.2G6, 6B3.2D3, 6H6.2D6, 9H2.2H10, 13G4.2F8, 13H12.2F8, 15G7.2A7, 19D9.2E5, 23B10.2B12, 24D12.2H9, F846C.1B2, F846C.1F5, F846C.1H12, F846C.1H5, F846C.2H3, F846TC.14A2, F846TC.14E4, F846TC.16B5, F846TC.7F10, F847C.10B9, F847C.11B1, F847C.12F12, F847C.26F5, F847C.4B10, F849C.8D10, F849C.8H3, 846.2B11, 846.4D5, 846T.1H2, 847.14H4, 846.2D4, 846.2F11, 846T.10B1, 846T.2E3, 846T.4C9, 846T.4E11, 846T.4F5, 846T.8D1, 847.10C9, 847.11D6, 847.15D12, 847.15F9, 847.15H11, 847.20H7, 847.21B11, 847.27B9, 847.28D1, 847.2B8, 847.3B3, 849.1D2, 849.2D7, 849.2F12, 849.4B2, 849.4F12, 849.4F2, 849.5C2, 849.8D12, F847C.21H6, 849.5H1, 847.23F11, 847.16D10, 847.13E2-mH0mL1, 847.13E2-mH0mL2, 847.12C4, 847.4D3, 2D10-VH0-VL0, 2D10-hVH4-HVL1, 2D10-hVH4-HVL2, 2D10-hVH4-HVL3, 2D10-hVH4-HVL4, 2D10-hVH3-HVL1, 2D10-hVH3-HVL2, 2D10-hVH3-HVL3, 2D10-hVH3-HVL4, 20H5.A3-VH3VL1, 20H5.A3-VH3VL3, 20H5.A3-VH4VL1, 20H5.A3-VH5VL1, 20H5.A3-VH5VL3, 20H5.A3-VH6VL1, 20H5.A3-VH6VL3, 2D10.2B2-v2, 2D10-VH0-NDA-VL0, 2D10-VH0-QDT-VL0, 2D10-VH0-SDT-VL0, 2D10-VH0-v1-QDT, 2D10-VH0-v2-QDT, 2D10-hVH1-hVL1, 2D10-hVH1-hVL2, 2D10-hVH1-hVL3, 2D10-hVH1-hVL4, 2D10-hVH2-hVL1, 2D10-hVH2-hVL2, 2D10-hVH2-hVL3, 2D10-hVH2-hVL4, 20H5.A3-hIgG4(S228P), 20H5.A3-hIgG4(S228P)-mv2, 798-9.20H5.A3-mH0mL1, 798-9.20H5.A3-mH1mL0, 798-9.20H5.A3-mH1mL1, 798-9.20H5.A3-mH2mL0, 798-9.20H5.A3-mH2mL1, 20H5.A3-VH1VL1, 20H5.A3-VH1VL2, 20H5.A3-VH1VL3, 20H5.A3-VH1VL4, 20H5.A3-VH1VL5, 20H5.A3-VH1VL6, 20H5.A3-VH2VL3, 20H5.A3-VH2VL4, 20H5.A3-VH2VL5, 20H5.A3-VH2VL6, 20H5.A3-VH3VL5, 20H5.A3-VH3VL6, 20H5.A3-VH4VL3, 20H5.A3-VH4VL4, 20H5.A3-VH4VL5, 20H5.A3-VH4VL6, 20H5.A3-VH5VL5, 20H5.A3-VH5VL6, 20H5.A3-VH6VL4, 20H5.A3-VH6VL5, 20H5.A3-VH6VL6, 20H5.A3-VH7VL1, 20H5.A3-VH7VL2, 20H5.A3-VH7VL3, 20H5.A3-VH7VL4, 20H5.A3-VH7VL5, 20H5.A3-VH7VL6, 20H5.A3_hVH3VL1-hIgG1 (KEMv2), 20H5.A3_hVH3VL1-hIgG1 (LALAPGv2), 20H5.A3_hVH3VL1-hIgG1 (REM), 20H5.A3_hVH5VL1-hIgG1 (KEMv2), 20H5.A3_hVH5VL1-hIgG1 (LALAPGv2), 20H5.A3_hVH5VL1-hIgG1 (REM), 20H5.A3_hVH6VL1-hIgG1 (KEMv2), 20H5.A3_hVH6VL1-hIgG1 (LALAPGv2), 20H5.A3_hVH6VL1-hIgG1 (REM), 21H6-H0L0, 21H6-H1L1, 21H6-H1L2, 21H6-H1L3, 21H6-H1L4, 21H6-H2L1, 21H6-H2L2, 21H6-H2L3, 21H6-H2L4, 21H6-H3L1, 21H6-H3L2, 21H6-H3L3, 21H6-H3L4, 21H6-H4L1, 21H6-H4L2, 21H6-H4L3, 21H6-H4L4, 21H6-H5L1, 21H6-H5L2, 21H6-H5L3, 21H6-H5L4, 21H6-H6L1, 21H6-H6L2, 21H6-H6L3, 21H6-H6L4, or binding fragment thereof.

[0453] 66. The method of any one of arrangements 47-65, wherein the anti-Gal3 antibody or binding fragment thereof is selected from the group consisting of: 20H5.A3, 20H5.A3-VH3VL1, 20H5.A3-VH3VL3, 20H5.A3-VH4VL1, 20H5.A3-VH5VL1, 20H5.A3-VH5VL3, 20H5.A3-VH6VL1, 20H5.A3-VH6VL3, or binding fragment thereof.

[0454] 67. The method of any one of arrangements 47-65, wherein the anti-Gal3 antibody or binding fragment thereof is selected from the group consisting of: 2D10-VH0-VL0, 2D10-hVH4-HVL1, 2D10-hVH4-HVL2, 2D10-hVH4-HVL3, 2D10-hVH4-HVL4, 2D10-hVH3-HVL1, 2D10-hVH3-HVL2, 2D10-hVH3-HVL3, 2D10-hVH3-HVL4, or binding fragment thereof.

[0455] 68. The method of any one of arrangements 47-65, wherein the anti-Gal3 antibody or binding fragment thereof is selected from the group consisting of: 21H6-H0L0, 21H6-H1L1, 21H6-H1L2, 21H6-H1L3, 21H6-H1L4, 21H6-H2L1, 21H6-H2L2, 21H6-H2L3, 21H6-H2L4, 21H6-H3L1, 21H6-H3L2, 21H6-H3L3, 21H6-H3L4, 21H6-H4L1, 21H6-H4L2, 21H6-H4L3, 21H6-H4L4, 21H6-H5L1, 21H6-H5L2, 21H6-H5L3, 21H6-H5L4, 21H6-H6L1, 21H6-H6L2, 21H6-H6L3, 21H6-H6L4, or binding fragment thereof.

### EXAMPLES

[0456] Some aspects of the embodiments discussed above are disclosed in further detail in the following examples, which are not in any way intended to limit the scope of the present disclosure. Those in the art will appreciate that many other embodiments also fall within the scope of the invention, as it is described herein above and in the claims.

### Example 1. Identification of Gal3-Binding Antibodies with and without Gal3-INSR Blocking Activity

[0457] To identify Gal3-binding antibodies with the capacity to block the assembly of Gal3 and INSR, an immunization campaign was run in mice. Balb/C, FVB, and CD-1F mice were inoculated at 7 day intervals with 50 μg of Gal3 protein fused to a linker-spaced 6-histidine tag, Gal3-ECD-His, (Acro GA3-H5129; Lot #819-43PS1-5E) in combination with a TLR agonist adjuvant mix (50 μg MPL, 20 μg CpG, 10 μg Poly(I:C) and 10 μg R848) for 3 repetitions, followed by an inoculation with 50 μg of Gal3-His alone administered subcutaneously to the inguinal, back of the neck and base of the tail sites as well as hock and intraperitoneal sites. Animals were sacrificed in accordance with IACUC protocol and spleen, femurs, and lymph nodes (axillary, accessory axillary, mediastinal, superficial inguinal, iliac, sacral and popliteal) were harvested. A single cell suspension of immunized lymph node (LN), spleen and bone marrow cells were obtained using 2 sterile frosted glass slides in a tissue culture petri dish with 15 mL DMEM. Bone marrow was extracted from femurs via end-cap flushing with a 5 mL syringe fitted with an 18-gauge needle. Cells from 3 animals were pelleted with 5 minutes of centrifugation at 1200 RPM, resuspended in 10 mL of DMEM (GIBCO 10564-011) and nucleated cells were enumerated by hemocytometer count. Cells were pelleted at 1200 RPM and were resuspended in SC-Buffer (PBS, 2% FBS and 1 mM EDTA), and plasma cells were isolated with an EasySep™ Mouse CD138 Positive Selection Kit (StemCell Technologies) with the manufacturer recommended protocol. Enriched CD138-positive cells were pelleted with 5 minutes of centrifugation at 1200 RPM, resuspended in 50 mL electrofusion buffer (Eppendorf 940-00-220-6) and were enumerated. Separately, SP2/0-mIL6 myeloma cells (ATCC CRL2016) were pelleted with 5 minutes of centrifugation at 1200 RPM, resuspended in 50 mL electrofusion buffer and were enumerated. Myeloma cells and CD138-positive plasma cells were combined at a 1:1 ratio, volume was expanded to 50 mL with electrofusion buffer, cells were pelleted with 5 minutes of centrifugation at 1200 RPM and supernatant was discarded. After a repeated step of washing and pelleting in electrofusion buffer, cells were resuspended in electrofusion buffer to a concentration of 10×10\hat{ }6 cells/mL, up to 9 mL of cell suspension was added to a BTX electrofusion chamber, and cells were fused with an 800V electrofusion protocol. Fused cells were rested for 5 minutes, transferred to a tissue culture dish containing 40 mL medium MM (DMEM, 15% FBS, 1% glutamax and 1% Pen/Strep), incubated for 1 hour at 37° C., 8% CO₂, resuspended with a pipette, pelleted with 5 minutes of centrifugation at 1200 RPM, resuspended in ClonaCell HY Liquid HAT Selection Medium (StemCell Technologies), and plated in 96-well tissue culture flat bottomed plates. After 10 days, supernatants were sampled and evaluated for binding to isolated Gal3 by ELISA. 50 μl of 0.1 μg/mL Gal3-ECD-His, (Acro GA3-H5129; Lot #819-43PS1-5E) resuspended in diluent (PBS with 0.5% BSA) was added to each well for 45 minutes, supernatant was discarded and plates were washed with phosphate buffered saline (PBS) with 0.05% Tween20. 50 μl of 1:5 dilution of hybridoma supernatant in diluent was added to each well for 1 hour, followed by 5 successive 300 μl washes with PBS/0.05% Tween20, after which a 1:3000 dilution of goat anti-mouse Fc-specific antibody conjugated to horseradish peroxidase (Novex A16090) in 50 μl of diluent was added to each well for 1 hour followed by 5 successive 300 μl washes with PBS/0.05% Tween20. Following washing, 50 μl of ABTS (Novex #00-202-4) was added to each well for 20-30 minutes, prior to readout on a spectrophotometer (Molecular Devices) at absorbance of 405 nm.

[0458] Positively scoring wells were evaluated for the ability to block association of Gal3 and INSR. To identify Gal3-targeted antibodies with the ability to block the interaction of Gal3 and INSR, purified Gal3 and INSR proteins were incubated in the presence of Gal3-immunization hybridoma supernatants described above, or without antibody, and protein interaction was evaluated by ELISA. Human Galectin-3 protein (Acro Biosystems, GA3-H5129) was diluted in PBS (Corning, 21-030-CM) to a concentration of 3 μg/ml and added to the wells of a 96-well ELISA plate (Thermo Fisher, 44-2404-21). After incubating the plate at 4° C. overnight, the plate was washed three times with PBST (PBS with 0.05% Tween 20 [VWR, 0777]). The plate was then blocked for an hour with 2% BSA (EMD Millipore, 126609) in PBST at room temperature with gentle rocking. Thereafter, the 2% BSA in PBST was discarded and antibody or inhibitor (3-fold dilutions beginning at 20 μg/ml, 60 μg/ml, or 180 μM) in 2% BSA in PBST was added to the wells. Afterwards, 6 μg/ml of human Insulin Receptor (Sino Biological, 11086-H08H) in 2% BSA in PBST was added to the antibody or inhibitor in the wells in a 1:1 ratio. The plate was incubated for an hour at room temperature with gentle rocking. Thereafter, the plate was washed three times with PBST, and 0.3 μg/ml of human INSR Biotinylated Antibody (R&D Systems, BAF1544) in 2% BSA in PBST was added to the wells. The plate was incubated for an hour with gentle rocking and then washed three times with PBST. Avidin-HRP (1:2000) was then added to the wells. The plate was incubated at room temperature for an hour with gentle rocking and then washed three times with PBST. TMB substrate (Thermo Scientific, 34029) was then added to each well. The reaction was stopped with 1M HCl (JT Baker, 5620-02) and read using a plate reader (Molecular Devices) at absorbance of 450 nm.

[0459] Several hGal3-binding antibodies with the ability to strongly block the binding of Gal3 to INSR were identified, depicted in FIG. 1 and FIG. 2, including 6H6.2D6, 20H5.A3, 20D11.2C6, 4G2.2G6, 13H12.2F8, 19B5.2E6, 15G7.2A7, 23H9.2E4, 19D9.2E5, 2D10.2B2, 4A11.2B5, 14H10.2C9, 3B11.2G2, 13A12.2E5, which reduced the binding of Gal3 and INSR at a concentration of 3 μg/mL to less than 5% of an unblocked sample. Additionally, monoclonal antibodies with reduced capacity to inhibit Gal3-INSR binding at 3 μg/mL to 15-25% of levels of an unblocked sample were identified, including 7D8.2D8 and 15F10.2D6. Finally, monoclonal antibodies with the capacity to minimally impact Gal3-INSR binding by 30% or less at 3 μg/ml were identified, including 9H2.2H1, 12G5.D7, 13G4.2F8, and 24D12.2H9.

[0460] To evaluate whether the ability to block Gal3 assembly with INSR was a function of antibody affinity to Gal3, the affinity of monoclonal Gal3 antibodies to Gal3 was evaluated by SPR. Kinetics experiments were performed on BiacoreT200 at 25° C. in high performance mode. Ligand proteins, purified antibodies were captured onto a CM5 chip coupled with anti-human Fc or anti-mouse Fc antibody, three antibodies at a time onto flow cell #2, 3, and 4, respectively, while flow cell #1 was used as reference. The analyte Galectin-3 in HBS-EP buffer was injected over all four flow cells at concentrations of 100, 50, 25, 12.5, 6.25, 3.125 and 0 nM at a flow rate of 30 μL/min. The complex was allowed to associate and dissociate for 240 and 300 seconds, respectively. The surfaces were regenerated with a 30 second injection of 10 mM Glycine pH 1.7 (flow rate 30 μL/min). The data were fit to a simple 1:1 interaction model using the global data analysis option available within BiacoreT200 Evaluation software V2.0.

[0461] The affinity of Gal3 monoclonal antibodies was confirmed to be greater than 30 nM for all antibodies studied (FIG. 3A). Importantly, 15G7, an antibody which reduced assembly of Gal3 and INSR by greater than 99% at 3 μg/mL exhibited an affinity of 27.8 nM for Gal3, indicating that the ability to block the assembly of Gal3 and INSR is possible with antibodies with affinity at or below this level. In contrast, Gal3-targeted antibodies which poorly block Gal3-INSR assembly, 13G4.2F8, 9H2.2H1, 24D12.2H9, and 12G5.D7, exhibited affinities of 18.4, 2.53, 4.13, and 1.9 nM, respectively. Thus, antibody affinity to Gal3 of less than 10 nM is not sufficient to predict the ability to block assembly of Gal3 and INSR.

### Example 2. Gal3-Targeted Antibodies with and without Gal3-INSR Blocking Activity Bind to Distinct Epitopes of Gal3

[0462] To identify the epitopes to which Gal3 antibodies with and without Gal3-INSR blocking activity bound, a library of 24 amino acid peptides representing portions of Gal3, depicted in FIG. 18, was produced and the ability of each peptide to bind Gal3 antibodies was evaluated by ELISA. At least 2 μg/ml of hGal3 peptide in 50 μl of PBS or 0.1 μg/ml of full-length human Gal3 protein (GenScript) and human Galectin-3 protein (Acro Biosystems, GA3-H5129) were diluted in PBS (Corning, 21-030-CM) to concentrations of at least 2 μg/ml or 0.1 μg/ml, respectively, and added to the wells of a 96-well ELISA plate (Thermo Fisher, 44-2404-21). After incubating the plate at 4° C. overnight, the plate was washed three times with PBST (PBS with 0.05% Tween 20 [VWR, 0777]). The plate was then blocked for an hour with 2% BSA (EMD Millipore, 126609) in PBST at room temperature with gentle rocking. Thereafter, the 2% BSA in PBST was discarded and human Galectin-3 hybridoma supernatants or antibodies were diluted in 2% BSA in PBST to concentrations of at least 0.1 μg/ml and added to the wells. The plate was incubated for an hour at room temperature with gentle rocking and then washed three times with PBST. Afterwards, Goat Anti-Mouse IgG-HRP (Jackson ImmunoResearch, 115-036-1461) or Goat Anti-Rat IgG HRP (Abcam, ab205720) diluted in 2% BSA in PBST (1:4000) were added to the wells. The plate was incubated for 30 minutes to 1 hour at room temperature with gentle rocking and then washed three times with PBST. TMB substrate (Thermo Scientific, 34029) was then added to each well. The reaction was stopped with 1M HCl (JT Baker, 5620-02) and read using a plate reader (Molecular Devices) at absorbance of 450 nm.

[0463] Binding of Gal3-binding antibodies to the peptide array was observed at multiple locations, with the majority of binding observed in Peptides 1-8 (SEQ ID NOs: 3-10), summarized in FIG. 3A. Significantly, all Gal3-binding antibodies with strong INSR-Gal3 blocking activity exhibited the ability to bind to peptides 4, 6, or 7, corresponding to peptide sequences in the N-terminal domain of Gal3. Specifically, six separate Gal3-binding antibodies with strong Gal3-INSR blocking activity (6H6.2D6, 20H5.A3, 20D11.2C6, 19B5.2E6, 15G7.2A7, and 23H9.2E4) all bound peptide 1 of Gal3, corresponding to amino acids 1-20 of Gal3, ADNFSLHDALSGSGNPNPQG (SEQ ID NO: 3). Conversely, no Gal3-targeted antibodies with poor Gal3-INSR blocking activity were observed to bind peptide 1. Taken together, these data indicate that binding to Gal3 peptide 1 is predictive of the ability to block the interaction of Gal3 with INSR. Similarly, two separate Gal3-binding antibodies with strong Gal3-INSR blocking activity (4G2.2G6 and 3B11.2G2) bound peptide 4 of Gal3, corresponding to amino acids 31-50 of Gal3, GAGGYPGASYPGAYPGQAPP (SEQ ID NO: 6). Conversely, no Gal3-targeted antibodies with poor Gal3-INSR blocking activity were observed to bind peptide 4. Taken together, these data indicate that binding to Gal3 peptide 4 is predictive of the ability to block the interaction of Gal3 with INSR. Further, seven Gal3-binding antibodies with strong Gal3-INSR blocking activity (13H12.2F8, 19D9.2E5, 14H10.2C9, 2D10.2B2, 4A11.2B5, 3B11.2D2, and 13A12.2E5) all bound peptide 6 of Gal3, corresponding to amino acids 51-70 of Gal3, GAYPGQAPPGAYPGAPGAYP (SEQ ID NO: 8). Conversely, no Gal3-targeted antibodies with poor Gal3-INSR blocking activity were observed to bind peptide 6. Taken together, these data indicate that binding to Gal3 peptide 6 is predictive of the ability to block the interaction of Gal3 with INSR. Additionally, eleven Gal3-binding antibodies with Gal3-INSR blocking activity (6H6.2D6, 20H5.A3, 20D11.2C6, 13H12.2F8, 19B5.2E6, 23H9.2E4, 15G7.2A7, 19D9.2E5, 14H10.2C9, 7D8.2D8, and 15F10.2D6) all bound peptide 7 of Gal3, corresponding to amino acids 61-80 of Gal3, AYPGAPGAYPGAPAPGVYPG (SEQ ID NO: 9). Conversely, no Gal3-targeted antibodies with poor Gal3-INSR blocking activity were observed to bind peptide 7. Taken together, these data indicate that binding to Gal3 peptide 7 is predictive of the ability to block the interaction of Gal3 with INSR. In total, these data indicate the utility of anti-Gal3 antibodies to Gal3 peptides 1, 4, 6, and 7 as predictive of the ability to block the interaction of Gal3 and INSR.

[0464] As illustrated in FIG. 18, peptides 4, 6, and 7 share repeated amino acid sequences comprised of proline-glycine (PG) and tyrosine-proline-glycine (YPG), suggesting a common feature that may explain the ability of Gal3-targeted antibodies to bind to multiple Gal3 peptides. Further, the amino acid sequence glycine-x-tyrosine-proline-glycine (GxYPG), where x may be the amino acids alanine (A), glycine (G), or valine (V), is shared in peptides 4, 6, and 7, each of which possess two such sequences separated by 3 amino acids. Accordingly, the presence of two GxYPG sequences in close apposition is likely predictive of the ability to bind Gal3-targeted antibodies with the ability to block Gal3 and INSR. Additionally, the Grantham distance of alanine, glycine, and valine is Ala-Val: 64, Ala-Gly: 60, Val-Gly: 109, thereby predicting that amino acids with similarly low Grantham distances may similarly be able to substitute at the variable region, including proline and threonine.

### Example 3. Gal3-INSR Antibodies with Blocking Activity Compete for Binding to Gal3

[0465] To determine whether Gal3-binding antibodies with Gal3-INSR blocking activity bind to the same or overlapping regions of the Gal3 molecule, antibody binning assays were performed to assess the ability of antibodies to simultaneously bind Gal3. Amine-reactive probes were loaded onto a Gator biosensor (Probe Life, Palo Alto, Calif.), equilibrated in dH20 for 60 seconds, dipped into 100 μl EDC 0.2M/NHS 0.05M activation buffer for 30 seconds, then dipped into a solution of 20 μg/μl human Gal3-His in 10 mM NaOAc buffer, pH 5 until binding was saturated, and quenched in 1 M ethanolamine pH 8.5 for 300 seconds. Following Gal3-His loading, tips were dipped in 20 μg/mL saturating antibody, then successively dipped into 5 μg/mL competing antibody. As shown in FIG. 3A-B, antibodies with competitive binding profiles were assigned bins and associations to blocking activity were made.

[0466] Separate bins of competitive antibody binding patterns to Gal3 were established. Significantly, strong associations between bin and blocking Gal3-INSR blocking activity were observed. All antibodies from bins 1, 2, 3, 4, 5, 6, and 7 strongly inhibited Gal3 binding to INSR, summarized in FIG. 3A. In contrast, antibodies in bin 8 were somewhat weaker blockers of Gal3 blocking to INSR, despite strong affinity to Gal3. Antibodies in bin 10, 11, and 12 uniformly did not have the ability to significantly inhibit the association of Gal3 and INSR. Thus, the competitive binding bins of 1, 2, 3, 4, 5, 6, and 7, are useful to predict the ability of Gal3-binding antibodies to block the assembly of Gal3 and INSR.

### Example 4. Gal3-INSR Blocking Antibody TB001 (IMT001-4) Reduces Weight Gain, Insulin Resistance, Glucose Insensitivity, Liver Steatosis, and Liver Dysfunction in High-Fat Diet Fed Diabetic Mice

[0467] To evaluate whether Gal3-INSR blockade by Gal3-targeted antibodies functionally impacted diabetes biology, a mouse model of type II diabetes was employed. Male C57BL6J mice were purchased from Jackson Lab and fed with high fat diet (HFD, 60% kcal from fat, Research Diet, Catalog #12492i) starting from 7-week old for 8 weeks, 10 or 16 weeks. Age-matched male C57BL6J mice fed with standard chow diet were used as control mice. The mice were housed in standard facilities and disposable standard cages with filter tops at room temperature with a 06:00-18:00 day-night cycle. Mice were fed with standard chow diet or HFD ad libitum except when fasted as indicated in the experiments. Glucose tolerance test (GTT) and insulin tolerance test (ITT) were done at 15 weeks and 16 weeks old (8 weeks and 9 weeks after HFD), respectively, to confirm the insulin resistant and glucose intolerant phenotype. For GTT, mice were fasted for 6 hours by transferring mice to clean cage with no food or faeces but with drinking water and then injected with 2 g/kg glucose (Sigma) and blood was drawn to measure glucose levels at 0, 15, 30, 60, 90, and 120 minutes after glucose injection. For ITT, mice were fasted for 6 hours, and then injected with 0.75 IU/kg body weight of Humalin-R (Eli Lilly) intraperitoneally. Blood from the tail was measured for glucose content using HemoCue Glucose 201 Analyzer at 0, 15, 30, 45, 60 minutes. Based on area under the curve (AUC) from ITT, HFD fed mice were randomized into two groups: human IgG4 isotype group and IMT001-4 treated group. At 17 weeks of age, mice were given antibody treatments by intraperitoneal injection twice a week for 5 doses before ITT and GTT were done at 19 weeks old and 20 weeks old. Human IgG4 isotype and IMT001-4 were dosed at 10 mg/kg with 100 μl/mouse and BM was dosed at 10 mg/ml with 100 μl/mouse. Treatments continued until the mice were sacked at 21 weeks old. The mice body weight was monitored one week after the mice arrived at the facility. Body weight was measured once a week using a balance. Mouse blood was collected using cardiac puncture. Liver, gastrocnemius muscle, and posterior subcutaneous white adipose fat were collected and weighed.

[0468] High-fat diet (HFD) fed mice were confirmed to have elevated basal glucose levels, and gained weight more rapidly than control-diet fed animals. Significantly, whereas HFD-fed mice treated with isotype control exhibited significant weight gain of over 7% body mass over the 19 day study, HFD-fed animals treated with IMT001-4 did not gain any appreciable weight (FIG. 4). Further, whereas isotype-control treated HFD-fed mice exhibited delayed response to glucose challenge, HFD-fed animals treated with IMT001-4 cleared glucose significantly more rapidly, in a manner more similar to mice fed with a normal diet (FIG. 5). Further, whereas HFD-fed animals treated with isotype control exhibited delayed glucose reduction in response to insulin challenge, IMT001-4 treated HFD-fed mice exhibited glucose clearance indistinguishable from non-diabetic mice fed a normal diet (FIG. 6). Collectively, these data support the finding that the Gal3-INSR blocking antibody IMT001-4 resolves multiple aspects of diabetes, including insulin resistance, glucose insensitivity, and weight gain.

[0469] To further evaluate the ability of IMT001-4 to impact the pathological sequalae of diabetes, liver sections from animals treated as in FIGS. 3-5 were examined for signs of fat accumulation, e.g., steatosis. Briefly, liver specimens were fixed in 4% paraformaldehyde for 24 hours, placed in 70% EtOH for 3 days, embedded into paraffin and 10 μm sections were cut and mounted to glass slides and stained with hematoxylin and eosin and visualized on a Revolve microscope at 40× magnification. Images were evaluated by ImageJ to quantitate the extent of steatosis.

[0470] Moderate levels of steatosis were observed in HFD-fed animals treated with control antibody, exemplified by the presence of circular-non stained regions in H&E stained sections (FIG. 7). In contrast, HFD-fed animals treated with IMT001-4 exhibited negligible levels of steatosis and were difficult to distinguish from livers of non-diabetic animals fed with a normal diet. Visual observations were confirmed by image quantification, which demonstrated a complete reversion of disease state in IMT001-4 treated animals relative to isotype-control treated animals. Accordingly, the Gal3-targeted Gal3-INSR blocking antibody, IMT001-4, has utility in reducing liver steatosis.

[0471] To further characterize the liver disease observed in histological samples, serum markers of liver dysfunction were evaluated in animals treated as above by ELISA. Briefly, mouse plasma samples were obtained from whole blood sample in lithium heparin collection tubes. 100 μl of serum was dispensed into the rotor of a VetScan VS2 Blood Chemistry Analyzer (Abaxis) through the sample port. ALT levels were determined as per the manufacturer's specification. Consistent with the observed elevated levels of steatosis observed in isotype-control treated HFD-fed diabetic mice relative to normal-diet fed non-diabetic mice, isotype-control HFD-fed diabetic mice exhibited nearly a 3-fold increase in ALT relative to normal-diet fed non-diabetic mice (FIG. 8). Strikingly, ALT levels were significantly decreased in IMT001-4 treated HFD-fed mice relative to HFD-fed isotype-control treated mice, to levels on-par with normal-diet fed non-diabetic mice. Accordingly, the Gal3-targeted Gal3-INSR blocking antibody, IMT001-4, has utility in reducing serum liver enzymes.

### Example 5: Anti-GAL3 Antibodies have Therapeutic Use in a Model of Advanced Type II Diabetes

[0472] In order to investigate the effect of therapeutic anti-GAL-3 antibodies on a severe case of type II diabetes, a mouse model using High Fat Diet (HFD)-fed db/db mice was implemented. Four-weeks-old male Bks-db mice (000642) obtained from Jackson lab were fed with 60% kcal HFD (Research Diet, 12492i) for eight weeks. Control animals (male C57BL6/J (000662), Jackson lab) were fed normal chow diet. db/db animals had increased levels circulating Gal-3 (FIG. 9). Animals were randomized based on the body composition measured by employing EchoMRI-500™ (EchoMRI). The HFD-fed db/db animals were treated with negative control (PBS), positive control (Semaglutide), or anti-GAL3 TB001 antibodies Q1W (once weekly). Wild type animals were used as a control (Healthy) group. The animals were dosed for twelve weeks. TB001 (anti-GAL3) treatment significantly prolonged survival of db/db animals (FIG. 10). The prolonged survival of the TB001-treated animals was also associated with a lack of change in the levels of fasting blood glucose compared to PBS-treated groups as depicted in FIG. 11. The fasting blood glucose was measured as described in Example 6. Briefly, the mice were fasted for 4-6 hours in clean cages with water and no food. Blood from the tail was diluted 2.5 times before using HemoCue Glucose 201 Analyzer and cuvettes (Mercedes Scientific 110706) to measure the blood glucose level.

### Example 6: Anti-GAL3 Antibodies have Therapeutic Use in a Mouse Model of Type I Diabetes

[0473] To assess the therapeutic potential of anti-GAL3 antibody in Type I diabetes, a mouse model of diabetes type I was used. Briefly, seven-weeks-old female NOD/ShiLtJ mice (Jackson lab (001976)) and control group animals NOR/LtJ (Jackson Lab (002050)) were housed in standard disposable cages with filter tops at room temperature with a 6:00-18:00 day-night cycle. Mice were allowed to rest for a week before initiating glucose monitoring. The antibody treatment was initiated when glucose levels reach 250-400 (mg/dL) for two consecutive days. To establish glucose levels, the blood samples were collected from tail vein of the experimental animals following housing in clean cages with water and no food for 4-6 hours. The collected samples were analyzed by HemoCue Glucose 201 Analyzer and cuvettes (Mercedes Scientific 110706). The animals were dosed twice a week (10 mg/kg) with anti-GAL3 antibodies (mTB001) or PBS control. The animals were sacrificed when the glucose levels reached >1000 (mg/dL) or until they exhibited morbidity symptoms (i.e. hunched posture, hypothermia, and hypoactivity). At the end stage, the plasma samples were collected from symptomatic animals. C-peptide levels were determined by Alpco Mouse C-peptide ELISA kit (Alpco, 80-CPTMS-E01). As depicted in FIG. 12, anti-GAL3 treatment prolonged survival of NOD/ShiLtJ animals and restored beta-cell function by stabilizing the levels of blood glucose (FIG. 13A) and restoring C-peptide levels (FIG. 13B). Therefore, anti-Gal3 treatment decreases the symptoms of both Type II and Type I diabetes.

### Example 7: Anti-GAL3 Antibodies have Therapeutic Use in a Mouse Model of Chronic Inflammatory Bowel Disease (IBD)

[0474] A mouse model of chronic inflammatory bowel disease was implemented to study the effect of Gal-3 antibodies. Briefly, seven-weeks-old male C57BL/6J mice were housed in standard disposable cages with filter tops at room temperature with a 6:00-8:00 day-night cycle. Mice were allowed to rest for one week before initiating the treatment.

[0475] Mice were randomized into the four treatment groups: no dextran sulfate sodium salt (DSS), 3% DSS in water+PBS, 3% DSS+mTB001 (10 mg/kg), 3% DSS+mTB001 (1 mg/kg). DSS water mixture was given for five consecutive days followed by seven days of normal water for a total of three DSS cycles and two normal water cycles. Body weight, stool consistency, gross bleeding score, and Hemoccult score (Fisher, SK-61130) were monitored daily. At necropsy, blood, colon, jejunum, ileum, duodenum, and spleen were preserved and flash frozen. Plasma Inflammatory cytokines were measured using Multi-spot Assay Systems (MSD) Proinflammatory Panel 1 (mouse) kit (MSD, K15048D). RT-qPCR was performed on frozen colon samples. Briefly, the colon tissue was disrupted using Qiazol lysis buffer (Qiagen, 79306) and the Qiagen Tissue Lyser II (Qiagen, 85300). RNA was extracted using RNeasy mini kit (Qiagen, 74104). cDNA was synthesized with iScript Reverse Transcription Supermix (BioRad, 1708841) at BioRad C1000 touch thermal cycler (BioRad, 1851138). RT-qPCR was performed using SsoAdvanced Universal SYBR green supermix (BioRad, 1725272) at CFX384 Touch Real-Time PCR detection system (BioRad, 1955485) using the primers in FIG. 14 (SEQ ID NO: 926-936).

[0476] Anti-galectin-3 treatment restored DSS-induced reduction in the colon length (FIG. 15) and reduced DSS-induced inflammation determined by the circulating levels of IFN-gamma (FIG. 16). In addition, mRNA levels of several pro-inflammatory genes (e.g. IFN-gamma, IL17a, IL-1beta, IL-21, IL-22) were reduced in response to TB001 treatment.

### Example 8: Binning and Peptide Binding Assay of Additional Exemplary Anti-Gal3 Antibodies

[0477] A large-scale antibody binning assay was performed on exemplary anti-Gal3 antibodies.

[0478] The epitope binning assay was done in a sandwich format on the high-throughput SPR-based Carterra LSA unit (CarterraBio, Salt Lake City, Utah). First, the purified antibodies were diluted to 10 μg/ml concentration in 10 mM NaOAc (pH 5.0) and then were covalently coupled via amine group to HC200M chip activated by EDC and S-NHS to immobilize antibodies to different positions of a 384-spot array. One hundred thirty-eight binning cycles were run on the array of immobilized antibodies. In each cycle, first, human Gal3 (AcroBio GA3-H5129) was injected over the entire array to bind to different antibodies (primary antibody), followed by one antibody (secondary antibody) selected among the panel of 150 anti-GAL3 antibodies tested. At the end of each cycle, the array was regenerated by 10 mM Glycine (pH 2.0) to remove bound antigen and secondary antibody from the array. The data analysis was done using the Epitope software by CarterraBio.

[0479] Binning results are shown in FIG. 26. In total, 49 distinct bins were identified for 120 anti-GAL3 antibodies that demonstrate binding to hGAL3 (30 antibodies out of 150 tested did not bind hGAL3 when immobilized on HC200M chip and were thus excluded from further analysis). Antibodies that strongly blocked the association of GAL3 and APP695 belonged to a number of distinct bins defined below. This highlights the utility of these bins as predictors of GAL3 binding activity.

[0480] Clones IMT001 (TB001) and F847C.21H6 exhibited mutual competitive binding for Gal3, but did not prevent binding of the rest of the clones, thus defining bin 1. Clones IMT006 (TB006), 19B5.2E6, 20H5.A3, 23H9.2E4, 2D10.2B2 exhibited mutual competitive binding for Gal3, but did not prevent binding of the rest of the clones, thus defining bin 3. Clones 20D11.2C6 and 15G7.2A7 exhibited mutual competitive binding for Gal3, but did not prevent binding of the rest of the clones, thus defining bin 5. Clones 3B11.2G2, 13A12.2E5 exhibited mutual competitive binding for Gal3, but did not prevent binding of the rest of the clones, thus defining bin 7. Clones 14H10.2C9, 15F10.2D6, 7D8.2D8, F846TC.14E4, F846TC.7F10, F849C.8D10 exhibited mutual competitive binding for Gal3, but did not prevent binding of the rest of the clones, thus defining bin 8. Clones 12G5.D7 and 849.2D7 exhibited mutual competitive binding for Gal3, but did not prevent binding of the rest of the clones, thus defining bin 10. Clones 24D12.2H9, 6B3.2D3, 849.1D2 exhibited mutual competitive binding for Gal3, but did not prevent binding of the rest of the clones, thus defining bin 11. Clones 13G4.2F8 and 9H2.2H10 exhibited mutual competitive binding for Gal3, but did not prevent binding of the rest of the clones, thus defining bin 12. Clones F846C.1B2, F846C.1F5, F846C.1H12, F846C.2H3, F846TC.16B5 exhibited mutual competitive binding for Gal3, but did not prevent binding of the rest of the clones, thus defining bin 17. In addition, clone 849.5H1 did not compete for binding to Gal3 with other antibodies tested, therefore defining bin 21.

[0481] Antibodies 847.12C4, 847.15D12, 847.15H11, 847.20H7, and 847.27B9 exhibited mutual competitive binding and competed with binding with the commercially available anti-Gal3 antibody B2C10 for hGAL3, but did not prevent binding of the rest of the clones, thus defining bin “B2C10”. B2C10 has been epitope mapped to bind to the first 18 amino acids of Gal3. Antibodies 847.10C9, 847.11D6, 847.13E2-mH0mL1, 847.13E2-mH0mL2, 847.16D10, 847.23F11, 847.28D1, and 847.3B3 exhibited mutual competitive binding to the C-terminal carbohydrate-recognition domain (CRD), but did not prevent binding of the rest of the clones, thus defining bin “CRD”. Antibodies F846TC.14A2, F847C.10B9, F847C.11B1, F847C.12F12, F847C.4B10, F849C.8H3, 849.8D12, F846C.1H5, 847.14H4, F847C.26F5, 849.2F12, were either not tested (“n/a”) or not assigned (“Unassigned”) to a bin. Antibodies 846.2B11, 846T.4C9, 847.15F9, 847.21B11, 847.2B8, 847.4D3, 849.4F12, and 849.4B2 were determined to not bind to hGAL3 under the conditions tested.

[0482] Gal3 peptide binding activity of additional exemplary anti-Gal3 antibodies was assessed with the same peptides as described in FIG. 18 (SEQ ID NOs: 3-26). Human Gal3 peptides (LifeTein, custom order) and human Gal3 proteins (R&D Systems, 8259-GA; TrueBinding, QCB200349) were diluted in PBS (Corning, 21-030-CM) to concentrations of at least 100 μg/mL (peptides) or 1 μg/mL (proteins), and added to the wells of several 96-well ELISA plates (Thermo Fisher, 44-2404-21). After incubating the plates at 4° C. overnight, the plates were washed three times with PBST (PBS with 0.05% Tween 20 [VWR, 0777]). The plates were then blocked for an hour with 2% BSA (EMD Millipore, 126609) in PBST at room temperature with gentle rocking. Thereafter, the 2% BSA in PBST was discarded and Gal3-binding antibodies (reformatted hIgG4 [S228P]) were diluted in 2% BSA in PBST to concentrations of 5 μg/mL and added to the wells. The plates were incubated for an hour at room temperature with gentle rocking and then washed three times with PBST. Afterwards, Peroxidase AffiniPure F(ab′)₂ Fragment Goat Anti-Human IgG (H+L) polyclonal antibody (Jackson ImmunoResearch, 109-036-003), was diluted in 2% BSA in PBST (1:4000) and added to the wells. The plates were incubated for 1 hour at room temperature with gentle rocking and then washed three times with PBST. TMB substrate (Thermo Scientific, 34029) was then added to each well. The reaction was stopped with 1M HCl (JT Baker, 5620-02) and read using a plate reader (Molecular Devices) at absorbance of 450 nm.

[0483] Peptide binding results are depicted in FIG. 26. Peptide numbering is based on FIG. 18. Binding of Gal3-binding antibodies to the peptide array was observed at multiple locations, with the majority of binding observed in peptides 1-8 and some binding to peptides 13 and 17.

[0484] 13 separate Gal3-binding antibodies (19B5.2E6, 20D11.2C6, 20H5.A3, 23H9.2E4, F846C.1H5, F846TC.14A2, F846TC.7F10, F847C.10B9, F847C.12F12, F847C.26F5, F847C.4B10, 15FG7.2A7, 849.1D2) all bound peptide 1 of Gal3, corresponding to amino acids ADNFSLHDALSGSGNPNPQG (SEQ ID NO: 3) of Gal3.

[0485] 7 separate Gal3-binding antibodies (15F10.2D6, 7D8.2D8, F846TC.14E4, F849C.8D10, F849C.8H3, 847.12C4, 847.10C9) bound peptide 2 of Gal3, corresponding to amino acids SGSGNPNPQGWPGAWGNQPA (SEQ ID NO: 4) of Gal3.

[0486] 5 separate Gal3-binding antibodies (15F10.2D6, 7D8.2D8, F849C.8D10, 847.12C4, 847.10C9) bound peptide 3 of Gal3, corresponding to amino acids WPGAWGNQPAGAGGYPGASY (SEQ ID NO: 5) of Gal3.

[0487] 4 separate Gal3-binding antibodies (13A12.2E5, 15F10.2D6, 3B11.2G2, 847.27B9) bound peptide 4 of Gal3, corresponding to amino acids GAGGYPGASYPGAYPGQAPP (SEQ ID NO: 6) of Gal3.

[0488] 4 separate Gal3-binding antibodies (TB001 (IMT001), F846C.1B2, F846C.1H12, F847C.21H6) bound peptide 5 of Gal3, corresponding to amino acids PGAYPGQAPPGAYPGQAPPG (SEQ ID NO: 7) of Gal3.

[0489] 15 separate Gal3-binding antibodies (TB001 (IMT001), TB006 (IMT006), 13A12.2E5, 14H10.2C9, 23H9.2E4, 2D10.2B2, 3B11.2G2, F846C.1B2, F846C.1F5, F846C.1H12, F846C.2H3, F846TC.16B5, F847C.21H6, 15FG7.2A7, 847.28D1) bound peptide 6 of Gal3, corresponding to amino acids GAYPGQAPPGAYPGAPGAYP (SEQ ID NO: 8) of Gal3.

[0490] 13 separate Gal3-binding antibodies (14H10.2C9, 19B5.2E6, 20D11.2C6, 20H5.A3, 23H9.2E4, F846C.1B2, F846TC.14A2, F847C.10B9, F847C.12F12, F847C.26F5, 15FG7.2A7, 9H2.2H10, 847.14H4) all bound peptide 7 of Gal3, corresponding to amino acids AYPGAPGAYPGAPAPGVYPG (SEQ ID NO: 9) of Gal3.

[0491] 4 separate Gal3-binding antibodies (20D11.2C6, 23H9.2E4, F846TC.14A2, 15G7.2A7) all bound peptide 8 of Gal3, corresponding to amino acids GAPAPGVYPGPPSGPGAYPS (SEQ ID NO: 10) of Gal3.

[0492] 2 separate Gal3-binding antibodies (847.12C4, 847.10C9) bound peptide 9 of Gal3, corresponding to amino acids PPSGPGAYPSSGQPSATGAY (SEQ ID NO: 11) of Gal3.

[0493] 3 separate Gal3-binding antibodies (15G7.2A7, 847.12C4, 847.10C9) all bound peptide 10 of Gal3, corresponding to amino acids SGQPSATGAYPATGPYGAPA (SEQ ID NO: 12) of Gal3.

[0494] 3 separate Gal3-binding antibodies (847.13E2-mH0mL1, 847.13E2-mH0mL2, 847.23F11) all bound peptide 13 of Gal3, corresponding to amino acids LPGGVVPRMLITILGTVKPN (SEQ ID NO: 15) of Gal3.

[0495] 13 separate Gal3-binding antibodies (7D8.2D8, F846C.1F5, F846C.1H12, F846C.2H3, F846TC.16B5, F847C.11B1, F849C.8H3, 849.1D2, 847.15D12, 847.13E2-mH0mL1, 847.13E2-mH0mL2, 847.23F11, 847.3B3) all bound peptide 17, corresponding to amino acids RFNENNRRVIVCNTKLDNNW (SEQ ID NO: 19) of Gal3.

[0496] 19 separate Gal-3 binding antibodies (849.2D7, 24D12.2H9, 6B3.2D3, 13G4.2F8, 849.5H1, 847.15H11, 847.20H7, 847.11D6, 847.16D10, 849.8D12, 846.2B11, 846T.4C9, 847.15F9, 847.21B11, 847.2B8, 847.4D3, 849.4F12, 849.4B2, 849.2F12) were not found to bind to any of the tested Gal3 peptides under the conditions used in this Example.

[0497] As illustrated in FIG. 18, peptides 4, 5, 6, and 7 share repeated amino acid sequences comprised of proline-glycine (PG) and tyrosine-proline-glycine (YPG), indicating a common feature that may explain the ability of Gal3-targeted antibodies to bind to multiple Gal3 peptides. Further, the amino acid sequence glycine-x-tyrosine-proline-glycine (GxYPG), where x may be the amino acids alanine (A), glycine (G), or valine (V), is shared in peptides 4, 6, and 7, each of which possess two such sequences separated by 3 amino acids. Accordingly, the presence of two GxYPG sequences in close apposition is likely predictive of the ability to bind Gal3-targeted antibodies. Additionally, the Grantham distance of alanine, glycine, and valine is Ala-Val: 64, Ala-Gly: 60, Val-Gly: 109, thereby predicting that amino acids with similarly low Grantham distances may similarly be able to substitute at the variable region, including proline and threonine.

### Example 9. Humanized Anti-Gal3 Antibodies have High Affinity for Gal3 of Different Species

[0498] Cross reactivity of exemplary anti-Gal3 antibodies TB001 and TB006 to human or mouse Gal3 were tested. Kinetics experiments were performed on a Carterra LSA at 25° C. An HC30M chip was immobilized with recombinant Protein A/G. TB001 (IMT001;

[0499] IMT001-4), TB006 (IMT006; IMT006-5), and a negative control antibody Synagis (10 μg/mL each diluted in HBSTE buffer (HEPES based saline with Tween-20 and EDTA) with 0.5 mg/mL BSA) were captured onto different spots in the 384-spot array. Then, a dilution series of Gal3 (2, 4, 8, 16, 32, 64, and 128 nM) in HBSTE with 0.5 mg/mL BSA was injected to the whole array for 300 seconds to allow association followed by dissociation for 240 seconds. The kinetics constants were calculated by the software NextGenKIT.

[0500] Separately, the affinity kinetics of TB001 and TB006 to cynomolgus Gal3 (cynoGal3) was measured on a Biacore T200 at 25° C. A CM5 chip coated with anti-mouse Fc/anti-human Fc mixture was used to load purified antibody TB001 or TB006 at 10 μg/mL in HBS-EP+ buffer (HEPES based saline with polysorbate 20 and EDTA) with 0.5 mg/mL BSA for 180 seconds, and then a dilution series of His-enterokinase cleavage site (EK)-cynoGal3 (TrueBinding in-house antigen) in HBS-EP+ with 0.5 mg/mL BSA starting from 100 nM, 1:2 dilution for 7 points for 200 seconds, followed by dissociation for 300 seconds. In each cycle, duplicates were made by loading the same antibody to flow cells FC2 and FC4, and then analyte was flowed to all 4 flow cells. The detection was done pairwise, FC2-FC1 and FC4-FC3, to subtract non-specific binding of analyte to the surface. A cycle of 0 nM analyte was run prior to a dilution series of analyte. The 0 nM raw data were subtracted from each non-zero concentration data to minimize machine drifts. The data were analyzed by Biacore Evaluation software version 2.0. The binding affinities were characterized by fitting the kinetic sensograms to a monovalent binding model (1:1 binding).

[0501] Separately, the affinity kinetics of TB001 and TB006 to rat Gal3 was measured on a Biacore T200 at 25° C. A CM5 chip was coated with goat anti-human Fc antibody on all 4 flow cells, and was used to load purified antibodies TB001, TB006, and Synagis (negative control), which all use an hIgG4 backbone. In each sample cycle, duplicates of the same antibody in HBS-EP+ with 0.5 mg/mL BSA at 10 μg/mL were captured to FC2 and FC4 by flowing at 10.0 μL/min for 120 seconds, and then diluted His-EK-ratGal3 in HBS-EP+ with 0.5 mg/mL BSA was injected to all 4 flow cells at 30.0 μL/min for 180 seconds, followed by dissociation for 240 seconds. A dilution series of His-EK-ratGal3 started from 300 nM, and was 1:3 diluted for 6 points. FC1 and FC3 were used as reference flow cells, and their sensograms were subtracted from FC2 and FC4 respectively to reduce non-specific binding background. Also, an additional sample cycle at 0 nM analyte was run, and its sensogram was subtracted from those of non-zero nM cycles to address machine drifts and bulk shifts. The data were analyzed by Biacore Evaluation software version 2.0. The binding affinities were characterized by fitting the kinetic sensograms to a monovalent binding model (1:1 binding).

[0502] The affinity of Gal3 binding to antibody was determined by acquiring real time Ligand:Analyte binding kinetics data and fitting the data with a 1:1 monovalent binding model. The kinetic evaluation procedure determines association and dissociation constants by fitting the experimental data to a 1:1 interaction model between analyte A and ligand B:

[0503] Kₐ: A+B→AB; and K_{d}: A+B←AB, where Kₐ is the association rate constant (M⁻¹s⁻¹) and the K_{d} is the dissociation rate constant (s⁻¹).

[0504] The net rate of complex formation during injection is given by:

d[AB]/dt=Kₐ[A][B]−K_{d}[AB]

[0505] and the rate of dissociation after the end of the injection is:

d[AB]/dt=−K_{d}[AB].

[0506] The affinity KD is the result of K_{d} divided by Kₐ.

[0507] Humanized TB001 (IMT001) and TB006 (IMT006a), which were derived from mouse mAbs, both have high affinity for human (IMT001: 3.6 nM, IMT006a: 8.9 nM) and cynomolgus (IMT001: 8.9 nM, IMT006a: 5.1 nM) Gal3 (FIG. 28). IMT001 also has high affinity for mouse Gal3 (IMT001: 2.3 nM, IMT006a: 40000 nM) and rat Gal3 (IMT001: 14 nM, IMT006a: undetected).

### Example 10. Antibodies that Bind to GAL3 NTD and CRD have Differential Activities in Regulating GAL3-Mediated GLUT4 Translocation

[0508] Insulin leads to glucose uptake by stimulating the translocation of the glucose transporter GLUT4 from intracellular stores to the plasma membrane. It was tested if Gal3 can interfere with GLUT4 translocation and if anti-Gal3 antibodies can block this effect.

[0509] Rat L6 GLUT4myc myoblasts (Kerafast #ESK202-FP) express a Myc-tagged GLUT4 that can be detected with an anti-Myc antibody. These cells were grown in a 48-well plate in MEM u growth media (Gibco, #12-571-063)+10% fetal bovine serum (FBS; Corning #35-016-CV) until 90-95% confluence was reached. Cells were then washed in PBS and serum starved for 2 hours in MEM u growth media without FBS. Thirty (30) μg/mL recombinant human Gal3 (TrueBinding QCB200347) was pre-incubated with 60 μg/mL anti-Gal3 antibodies for 30 minutes before being added to the serum-starved cells for 1 hour at 37° C. At the end of incubation, half of the cells were treated with 100 nM insulin (Sigma-Aldrich #I5523-50MG) for 20 minutes while the other half acted as basal controls. After 20 minutes, cells were washed quickly with ice cold PBS twice, then incubated with 4% paraformaldehyde (Boster Bio #AR1068) for 10 minutes on ice followed by 10 minutes at room temperature. The cells were washed three times with PBS, then blocked with 0.5 mL 5% goat serum (Vector Laboratories #101098-382) in PBS for 15 minutes. After the blocking agent was aspirated from the cells, 1 μg/ml anti-Myc polyclonal antibody (Sigma-Aldrich #C-3956) in 5% goat serum was added for 1 hour. One well did not receive the primary antibody and was used later for background subtraction. Primary antibody was aspirated away, and then cells washed 5 times with PBS. Next, cells (including background controls) were incubated with 1:1000 goat anti rabbit antibody secondary antibody (Abcam #Ab97051) in 5% Goat serum for 30 minutes at room temperature. After washing, cells were incubated with 400 μL of TMB (Thermo Scientific #PI34029) for 5 minutes, then 200 μL of 1N HCL (Avantor Performance #JT5620-2) was added to stop the reaction. 100 μL of the sample was transferred to a 96 well plate with duplicates transferred for each condition. Samples were read at 450 nm on a SpectraMax plate reader. After subtracting background control values for cells that did not receive primary antibody, the GLUT4 Translocation Insulin Stimulation Index was calculated as the fold change of cells treated with Gal3 alone or treated with Gal3 following pre-incubation with anti-Gal3 antibodies with insulin (Stimulated) to that of without insulin (Basal). The fold changes were plotted on GraphPad Prism and presented as mean (SEM) of the technical replicates. Statistical significance was determined using unpaired T-tests comparing samples treated with Gal3 and insulin with all other conditions.

[0510] FIG. 30 shows that insulin stimulation elevates the surface level of Myc-tagged GLUT4 that can be detected and that Gal3 co-treatment blocks that increase. Antibodies that bind the N-terminal domain (NTD) of Gal3 (e.g. TB001, TB006, 2D10-VH0-VL0, 20H5.A3) reduce the ability of Gal3 to block GLUT4 translocation. Antibodies that bind to the carbohydrate recognition binding domain (CRD) of Gal3 (e.g. 13E2) enhance the ability of Gal3 to block GLUT4 translocation.

[0511] FIG. 31A shows that variants of 20H5 (20H5.A3-VH3VL1, 20H5.A3-VH3VL3, 20H5.A3-VH4VL1, 20H5.A3-VH5VL1, 20H5.A3-VH5VL3, 20H5.A3-VH6VL1, 20H5.A3-VH6VL3) can reduce the ability of Gal3 to block insulin-dependent GLUT4 translocation. FIG. 31B shows that variants of 2D10-VH0-VL0 (2D10-VH0-VL0, 2D10-hVH4-HVL1, 2D10-hVH4-HVL2, 2D10-hVH4-HVL3, 2D10-hVH4-HVL4, 2D10-hVH3-HVL1, 2D10-hVH3-HVL2, 2D10-hVH3-HVL3, 2D10-hVH3-HVL4) can reduce the ability of Gal3 to block GLUT4 translocation. It is believed that the variation in blocking between the antibodies is due to variations in the antibodies' aggregation status, rather than the effectiveness of the specific CDRs for the antibodies.

### Example 11. Anti-Gal3 Antibodies Block Gal3-Induced Apoptosis in Pancreatic Islet Cells

[0512] Death of insulin-secreting pancreatic islet beta cells can lead to diabetes. It can be tested if Gal3 can induce beta cell apoptosis and if anti-Gal3 antibodies can block this effect.

[0513] The INS-1 832/13 cell line (Sigma-Aldrich #SCC207) is a rat beta cell line that produces insulin. These cells will be grown in a 48-well plate in RPMI-1640 with glucose (Gibco #11875-093)+10% FBS (Corning #35-016-CV) until 90-95% confluence is reached. Cells will then be washed in PBS and serum starved for 2 hours in RPMI without glucose (Gibco #11879-020) and without FBS added. 30 μg/mL recombinant human Gal3 (TrueBinding QCB200347) will be pre-incubated with or without 60 μg/mL anti-Gal3 antibodies for 30 minutes before being added to the serum-starved cells for 1-4 hour at 37 C. At the end of the time course, cells will be lysed and analyzed for apoptosis with a Caspase 3 Assay (Sigma Aldrich #CASP3F). The fold change in fluorescence of cells that will be treated with Gal3 alone or Gal3 incubated with anti-Gal3 antibodies compared to those that will be unstimulated will be tested to ascertain change in Gal-3 induced apoptosis. The fold changes are plotted on GraphPad Prism and show the mean (+SEM) of the technical replicates. Statistical significance will be determined using an ordinary one-way ANOVA.

### Example 12: Anti-Gal3 Antibodies for Use in the Treatment of Diabetes

[0514] Patients present with diabetes mellitus type I or type II. One or more anti-Gal3 antibodies or binding fragments thereof disclosed herein are administered to the patients enterally, orally, intranasally, parenterally, intracranially, subcutaneously, intramuscularly, intradermally, or intravenously.

[0515] The anti-Gal3 antibodies or binding fragments thereof are administered as doses in at an amount of 1 ng (or in the alternative: 0.1, 10, 100, 1000 ng, or 1, 10, 50, 100, 200, 300, 400, 500, 600, 700, 800, 900, 1000 μg, or 1, 10, 100, 200, 300, 400, 500, 600, 700, 800, 900, 1000 mg, or any amount within a range defined by any two of the aforementioned amounts, or any other amount appropriate for optimal efficacy in humans). The doses are administered every 1 day (or in the alternative: every 2, 3, 4, 5, 6, 7, 8, 9, 10, 11, 12, 24, 36, or 48 days or any time within a range defined by any two of the aforementioned times).

[0516] A treatment of the diabetes or symptoms associated with diabetes is observed in the patients following administration of the anti-Gal3 antibodies or binding fragments thereof. Administration of the anti-Gal3 antibodies or binding fragments may be performed in conjunction with another therapy for diabetes, for example, insulin, an insulin derivative or mimetic thereof, insulin aspart, insulin glulisine, insulin lispro, insulin isophane, insulin degludec, insulin detemir, insulin zinc, insulin glargine, vanadium, biguanides, metformin, phenformin, buformin, thiazolidinediones, rosiglitazone, pioglitazone, troglitazone, tolimidone, sulfonylureas, tolbutamide, acetohexamide, tolazamide, chlorpropamide, glipizide, glibenclamide, glimepiride, gliclazide, glyclopyramide, gliquidone, meglitinides, repaglinide, nateglinide, alpha-glucosidase inhibitors, miglitol, acarbose, voglibose, incretins, glucagon-like peptide 1, glucagon-like peptide agonists, exenatide, liraglutide, taspoglutide, lixisenatide, semaglutide, dulaglutide, gastric inhibitory peptide, dipeptidyl peptidase-4 inhibitors, vildagliptin, sitagliptin, saxagliptin, linagliptin, alogliptin, septagliptin, teneligpliptin, gemigliptin, pramlintide, dapagliflozin, canagliflozin, empagliflozin, or remogliflozin.

### Example 13: Anti-Gal3 Antibodies for Use in the Treatment of Insulin Resistance

[0517] Patients present with insulin resistance, which may be associated with one or more diseases, including but not limited to diabetes mellitus, chronic hyperinsulinemia, dysmetabolic syndrome, type A insulin resistance syndrome, type B insulin resistance syndrome, gestational diabetes, acanthosis nigricans, polycystic ovary syndrome (PCOS), obesity, muscle wasting, cardiovascular diseases, cardiac hypertrophy, myocardial ischemia, hypertension, pancreatic cancer associated diabetes (PCDM), or cancers. One or more anti-Gal3 antibodies or binding fragments thereof disclosed herein are administered to the patients enterally, orally, intranasally, parenterally, intracranially, subcutaneously, intramuscularly, intradermally, or intravenously.

[0518] The anti-Gal3 antibodies or binding fragments thereof are administered as doses in an amount of 1 ng (or in the alternative: 0.1, 10, 100, 1000 ng, or 1, 10, 50, 100, 200, 300, 400, 500, 600, 700, 800, 900, 1000 μg, or 1, 10, 100, 200, 300, 400, 500, 600, 700, 800, 900, 1000 mg, or any amount within a range defined by any two of the aforementioned amounts, or any other amount appropriate for optimal efficacy in humans). The doses are administered every 1 day (or in the alternative: every 2, 3, 4, 5, 6, 7, 8, 9, 10, 11, 12, 24, 36, or 48 days or any time within a range defined by any two of the aforementioned times).

[0519] A treatment of the insulin resistance or symptoms associated with insulin resistance is observed in the patients following administration of the anti-Gal3 antibodies or binding fragments thereof. Administration of the anti-Gal3 antibodies or binding fragments may be performed in conjunction with another therapy for insulin resistance, for example, insulin, an insulin derivative or mimetic thereof, insulin aspart, insulin glulisine, insulin lispro, insulin isophane, insulin degludec, insulin detemir, insulin zinc, insulin glargine, vanadium, biguanides, metformin, phenformin, buformin, thiazolidinediones, rosiglitazone, pioglitazone, troglitazone, tolimidone, sulfonylureas, tolbutamide, acetohexamide, tolazamide, chlorpropamide, glipizide, glibenclamide, glimepiride, gliclazide, glyclopyramide, gliquidone, meglitinides, repaglinide, nateglinide, alpha-glucosidase inhibitors, miglitol, acarbose, voglibose, incretins, glucagon-like peptide 1, glucagon-like peptide agonists, exenatide, liraglutide, taspoglutide, lixisenatide, semaglutide, dulaglutide, gastric inhibitory peptide, dipeptidyl peptidase-4 inhibitors, vildagliptin, sitagliptin, saxagliptin, linagliptin, alogliptin, septagliptin, teneligpliptin, gemigliptin, pramlintide, dapagliflozin, canagliflozin, empagliflozin, or remogliflozin.

### Example 14: Quantification of Affinity for Exemplary Anti-Gal3 Antibodies to Gal3 of Different Species

[0520] The protocol disclosed in Example 9 was generally followed.

[0521] TB001 showed binding to human Gal3 at an average affinity of 9.7 nM (FIG. 40A), while TB006 binds to human Gal3 at an average affinity of 23 nM (FIG. 40B). Synagis did not bind to human Gal3.

[0522] TB001 showed binding to mouse Gal3 at an average affinity of 4.2 nM (FIG. 41A), while TB006 or Synagis did not show any binding activity to mouse Gal3 (FIG. 41B-C).

[0523] TB001 showed binding to His-EK-cynoGal3 at an affinity of 34 nM (FIG. 42A, left panel), while TB006 binds to His-EK-cynoGal3 at an affinity of 9.4 nM (FIG. 42A, right panel). Synagis did not bind to His-EK-cynoGal3 (FIG. 42B).

[0524] TB001 showed binding to His-EK-ratGal3 at an average affinity of 14 nM (representative sensogram depicted in FIG. 43A), while TB006 or Synagis did not bind to His-EK-ratGal3.

[0525] The resulting data showed similar binding profiles of TB001 and TB006 to human Gal3 and cynomolgus Gal3. Meanwhile, TB001 displayed stronger binding activity to rat and mouse Gal3 in comparison to the binding activity of TB006.

### Example 15: Screening for Additional Anti-Gal3 Antibodies that Induce Insulin-Independent GLUT4 Translocation

[0526] Additional anti-Gal3 antibodies were screened for ability to induce insulin-independent GLUT4 translocation in L6 GLUT4myc myoblasts according to the protocol provided in Example 10, but modified such that the cells were not treated with insulin. In these experiments, 30 μg/mL (approximately 1 μM) of human Gal3 was incubated with 60 μg/mL (approximately 0.4 μM) of candidate antibodies or MOPC21 control antibody, and cells were treated without insulin.

[0527] The preincubated TB006 and Gal3 complex increased surface GLUT4 levels independent of insulin in tested L6 GLUT4myc cells (FIG. 44A). Interestingly, TB006 alone did not result in comparable induction of GLUT4 translocation, suggesting that the antibody-Gal3 complex exhibits an insulin-independent effect relative to antibody alone.

[0528] The 2D10.2B2 (2D10) antibody and variants thereof disclosed herein were screened for the ability to induce insulin-independent GLUT4 translocation according to the same protocol provided in Example 10, but modified such that the cells were not treated with insulin. The 2D10 variants have the same heavy chain and light chain CDRs and generally vary in framework sequences. Exemplary variants tested (and their corresponding VH and VL) are shown in Table 1. Each of the 2D10 variants increased surface GLUT4 levels independent of insulin in tested L6 GLUT4myc cells (FIG. 44B).

TABLE 1
Tested 2D10 variants

| | Heavy chain | Light chain |
|---|---|---|
| Antibody | variable region | variable region |
| 2D10-VH0-v1-QDT | SEQ ID NO: 959 | SEQ ID NO: 973 |
| 2D10-hVH1-hVLl | SEQ ID NO: 961 | SEQ ID NO: 975 |
| 2D10-hVH1-hVL2 | SEQ ID NO: 962 | SEQ ID NO: 976 |
| 2D10-hVH1-hVL3 | SEQ ID NO: 963 | SEQ ID NO: 977 |
| 2D10-hVH1-hVL4 | SEQ ID NO: 964 | SEQ ID NO: 978 |
| 2D10-hVH2-hVLl | SEQ ID NO: 965 | SEQ ID NO: 979 |
| 2D10-hVH2-hVL2 | SEQ ID NO: 966 | SEQ ID NO: 980 |
| 2D10-hVH2-hVL3 | SEQ ID NO: 967 | SEQ ID NO: 981 |
| 2D10-hVH2-hVL4 | SEQ ID NO: 968 | SEQ ID NO: 982 |
| 2D10-hVH3-hVLl | SEQ ID NO: 810 | SEQ ID NO: 825 |
| 2D10-hVH3-hVL2 | SEQ ID NO: 811 | SEQ ID NO: 826 |
| 2D10-hVH3-hVL3 | SEQ ID NO: 812 | SEQ ID NO: 827 |
| 2D10-hVH3-hVL4 | SEQ ID NO: 813 | SEQ ID NO: 828 |
| 2D10-hVH4-hVLl | SEQ ID NO: 806 | SEQ ID NO: 821 |
| 2D10-hVH4-hVL2 | SEQ ID NO: 807 | SEQ ID NO: 822 |
| 2D10-hVH4-hVL3 | SEQ ID NO: 808 | SEQ ID NO: 823 |
| 2D10-hVH4-hVL4 | SEQ ID NO: 809 | SEQ ID NO: 824 |

[0529] Variants of the 20H5.A3 (20H5) antibody disclosed herein were screened for the ability to induce insulin-independent GLUT4 translocation according to the same protocol provided in Example 10, but modified such that the cells were not treated with insulin. The 20H5 variants have the same heavy chain and light chain CDRs and generally vary in the framework sequences. Exemplary variants tested (and their corresponding VH and VL) are shown in Table 2. The 20H5 variants exhibited variability in increasing surface GLUT4 levels independent of insulin, with some variants reducing GLUT4 levels, in tested L6 GLUT4myc cells (FIG. 44C).

TABLE 2
Tested 20H5 variants

| | Heavy chain | Light chain |
|---|---|---|
| Antibody | variable region | variable region |
| 20H5.A3-VH3VL1 | SEQ ID NO: 814 | SEQ ID NO: 829 |
| 20H5.A3-VH3VL3 | SEQ ID NO: 815 | SEQ ID NO: 830 |
| 20H5.A3-VH4VL1 | SEQ ID NO: 816 | SEQ ID NO: 831 |
| 20H5.A3-VH4VL3 | SEQ ID NO: 1086 | SEQ ID NO: 1129 |
| 20H5.A3-VH4VL4 | SEQ ID NO: 1087 | SEQ ID NO: 1130 |
| 2OH5.A3-VH5VL1 | SEQ ID NO: 817 | SEQ ID NO: 832 |
| 2OH5.A3-VH5VL3 | SEQ ID NO: 818 | SEQ ID NO: 833 |
| 2OH5.A3-VH6VL1 | SEQ ID NO: 819 | SEQ ID NO: 834 |
| 20H5.A3-VH6VL3 | SEQ ID NO: 820 | SEQ ID NO: 835 |
| 20H5.A3-VH6VL4 | SEQ ID NO: 1092 | SEQ ID NO: 1135 |

[0530] Variants of the F847C.21H6 (21H6) antibody disclosed herein were screened for the ability to induce insulin-independent GLUT4 translocation according to the same protocol provided in Example 10, but modified such that the cells were not treated with insulin. The 21H6 variants have the same heavy chain and light chain CDRs and generally vary in the framework sequences. Exemplary variants tested (and their corresponding VH and VL) are shown in Table 3. The 2116 variants, other than 2116-H0L0, increased surface GLUT4 levels independent of insulin in tested L6 GLUT4myc cells (FIG. 44D).

TABLE 3
Tested 21H6 variants

| | Heavy chain | Light chain |
|---|---|---|
| Antibody | variable region | variable region |
| F847C.21H6 | SEQ ID NO: 367 | SEQ ID NO: 440 |
| 21H6-H0L0 | SEQ ID NO: 1415 | SEQ ID NO: 1440 |
| 21H6-H1L1 | SEQ ID NO: 1416 | SEQ ID NO: 1441 |
| 21H6-H1L2 | SEQ ID NO: 1417 | SEQ ID NO: 1442 |
| 21H6-H1L3 | SEQ ID NO: 1418 | SEQ ID NO: 1443 |
| 21H6-H1L4 | SEQ ID NO: 1419 | SEQ ID NO: 1444 |
| 21H6-H2L1 | SEQ ID NO: 1420 | SEQ ID NO: 1445 |
| 21H6-H2L2 | SEQ ID NO: 1421 | SEQ ID NO: 1446 |
| 21H6-H2L3 | SEQ ID NO: 1422 | SEQ ID NO: 1447 |
| 21H6-H2L4 | SEQ ID NO: 1423 | SEQ ID NO: 1448 |
| 21H6-H3L1 | SEQ ID NO: 1424 | SEQ ID NO: 1449 |
| 21H6-H3L2 | SEQ ID NO: 1425 | SEQ ID NO: 1450 |
| 21H6-H3L3 | SEQ ID NO: 1426 | SEQ ID NO: 1451 |
| 21H6-H3L4 | SEQ ID NO: 1427 | SEQ ID NO: 1452 |

[0531] In addition to these antibodies, other anti-Gal3 antibodies disclosed herein were tested for their ability to induce insulin-independent GLUT4 translocation according to the same protocol provided in Example 10, but modified such that the cells were not treated with insulin (FIG. 44E).

### Example 16: The Gal3 N-Terminal and C-Terminal Domain are Important for Inducing GLUT4 Translocation

[0532] Insulin-independent GLUT4 translocation induced by complexed Gal3 and anti-Gal3 antibody in L6 GLUT4myc myoblasts was tested according to the protocol provided in Example 10 but using different mutants of Gal3. The human Gal3 mutants that were tested include: hGal3 R186S (mutation that blocks glycan binding), amino acids 65-250 of hGal3, hGal3 P64H (mutation that makes Gal3 susceptible to cleavage by MMP), amino acids 2-112 of hGal3 (N-terminal domain), and amino acids 111-250 of hGal3 (C-terminal carbohydrate recognition domain). The Gal3 mutants were pre-incubated with TB006 to form a Gal3-antibody complex prior to myoblast treatment.

[0533] FIG. 45 shows the ability of TB006 complexed with the different Gal3 mutants to induce insulin-independent GLUT4 translocation. The 2-112 amino acid N-terminal truncation and the 111-250 amino acid C-terminal truncation both exhibit significantly reduced GLUT4 translocation, suggesting that both domains of the Gal3 protein are important for insulin-independent GLUT4 translocation activity. Similar reduction of ability was observed for the Gal3 R186S mutant, suggesting that glycan binding by Gal3 is also involved in GLUT4 translocation.

### Example 17: Gal3 Binds to the Glucose Transporters GLUT1 and GLUT4 and Anti-Gal3 Antibodies Block this Binding

[0534] Human Gal3 protein was diluted in PBS to a concentration of 4 μg/mL and coated on a 96-well ELISA plate by adding 80 μL per well. Additional wells were coated with a two-fold serial dilution of Gal3 in PBS (2 μg/mL and 1 μg/mL) or no Gal3 coat control. After incubating the plate at 4° C. overnight, the plate was washed with 300 μL PBST three times, followed by a blocking step with 150 μL of 2% BSA in PBST per well and incubated for an hour at room temperature (RT) with gentle rocking. The existing blocking solution was then discarded from the plate. Binding solutions were prepared by diluting GLUT1 and GLUT4 proteins tagged with FLAG in separate buffers of 2% BSA in PBST to a concentration of 4 μg/mL. The GLUT1 and GLUT4 dilutions were then applied to the plate by adding 60 μL per well column-wise for each Gal3 coat concentration condition, and then two-fold serially diluted (2 μg/mL and 1 μg/mL) in 2% BSA in PBST. The plate was incubated for an hour at RT with gentle rocking, and then washed with 300 μL PBST three times. Afterwards, HRP-tagged anti-FLAG antibodies were diluted to 1:4000 in 2% BSA in PBST, and 25 μL was added to all of the wells. The plate was incubated for an hour at RT with gentle rocking, and then washed with 300 μL PBST three times. To develop the plate, 50 μL of ABTS substrate was added to each well and incubated until a sufficiently high signal was achieved. The plate was read in a plate reader at an absorbance of 405 nm. Data was graphed using GraphPad Prism 8.0 software (GraphPad Software, Inc.).

[0535] FIG. 46A depicts the results of the Gal3 with GLUT1 or GLUT4 binding ELISA. Both GLUT1 and GLUT4 bound to Gal3 in a concentration-dependent manner.

[0536] ELISA was also used to quantify IC50s of exemplary anti-Gal3 antibodies TB006 and 2D10-VH0-VL0 for disrupting the interaction between Gal3 and GLUT1 or GLUT4. Human Gal3 protein was diluted in PBS to a concentration of 2 μg/mL and used to coat a 96-well ELISA plate with 40 μL per well. After incubating the plate at 4° C. overnight, the plate was washed three times with 300 μL PBST. A blocking step was performed with 150 μL of 2% BSA in PBST per well and incubated for an hour at RT with gentle rocking. The existing blocking solution was then discarded form the plate. Antibodies TB006, 2D10-VH0-VL0 (2D10), or MOPC21 hIgG4 isotype control were diluted to 180 μg/mL in 2% BSA in PBST, then applied to the plate by adding 45 μL to each well in the leftmost column and serially diluted 3-fold rightwards across the plate. 30 μL of 3 μg/mL of FLAG-tagged GLUT1 or GLUT4 protein diluted in 2% BSA in PBST was then added to the appropriate wells containing antibody or control solution. The plate was incubated for an hour at RT with gentle rocking and then washed three times with 300 μL PBST. Afterwards, HRP-tagged anti-FLAG antibody was diluted to 1:4000 in 2% BSA in PBST, and 25 μL was added to all of the wells. The plate was incubated for an hour at RT with gentle rocking, and then washed with 300 μL PBST three times. To develop the plate, 50 μL of ABTS substrate was added to each well and incubated until a sufficiently high signal was achieved. The plate was read with a plate reader at an absorbance of 405 nm. Data was graphed using GraphPad Prism 8.0 software and IC50 values were generated using manufacturer instructions.

[0537] The ELISA results for GLUT1 (FIG. 46B) and GLUT4 (FIG. 46C) indicate a consistent concentration-dependent ability for anti-Gal3 antibodies TB006 and 2D10 to inhibit the binding of these glucose transporters to Gal3. MOPC21 isotype control failed to block the Gal3 binding to either GLUT1 or GLUT4. FIG. 46D show the calculated IC50 for the conditions tested.

### Example 18: GLUT4 Binds to the C-Terminal Domain of Gal3 as Determined by Hydrogen-Deuterium Exchange

[0538] Hydrogen-deuterium exchange mass spectrometry (HDX-MS) can be used to determine the binding site between antibody and antigen. The protein interaction decreases deuterium uptake by the two proteins at their binding position, and thus causes a mass shift between bound and unbound samples. The mass shift can be detected using mass spectrometry. In the data process, the deuterium uptake difference (bound minus unbound) at the residue level is visualized using a heatmap. In a protein sequence, the residues with negative mass shift indicate that this may be the binding site, and the heatmap shows the intensity of the binding interaction on different residues in a protein sequence.

[0539] FIG. 47 depicts a heatmap of HDX-MS to determine the binding region of hGal3 with GLUT4. An Arg 228-Val 292 truncated form of GLUT4 that is soluble under buffer conditions was used. Binding as detected by less deuterium uptake was found mainly on the C-terminal domain of Gal3. Three major binding sites were determined as amino acids 101-106, 148-195, and 211-237 as shown in FIG. 47. The amino acid 211-237 binding region was determined to have the strongest binding affinity among these.

### Example 19: Anti-Gal3 Antibodies are Internalized into Cells Only in the Presence of Gal3

[0540] It was tested whether anti-Gal3 antibodies were internalized into skeletal muscle cells. L6 myoblasts were seeded at a density of 10000 cells per well in a black clear bottom 96 well plate in L6 complete medium. The next day, the cells were serum starved using serum-free medium in the morning for 2 hours before proceeding with the following internalization experiment. Exemplary anti-Gal3 antibodies TB006 and 2D10, or MOPC21 isotype control, were conjugated with fluorophore using the Xenon pHrodo iFL Red Human IgG Labeling Reagent (Thermo Fisher). The fluorophore-conjugated antibodies were then mixed with Gal3 protein (2 μg/mL or 10 μg/mL Gal3) or without Gal3 as control, and this mixture was added to the myoblasts. After 3 hours of incubation, fluorescent images of the cells were taken.

[0541] FIG. 48 depicts fluorescent images of the myoblasts contacted with the anti-Gal3 antibody and Gal3 complexes. Internalization of the tested anti-Gal3 antibodies were observed only when the antibodies were first incubated with Gal3 (i.e. the null Gal3 control did not result in antibody internalization). The MOPC21 isotype control was not observed to internalize into the myoblasts under any condition.

### Example 20: Anti-Gal3 Antibodies Rescue Gal3-Induced Glucose Intolerance in Mice

[0542] FIG. 49A depicts a schematic for testing the effects of anti-Gal3 antibody administration on Gal3-mediated glucose intolerance in vivo in mice. C57BL6/J mice were fasted for a day, and then injected intraperitoneally with 0.3 mg/kg mouse Gal3 with or without 30 mg/kg TB001, or with PBS as control. Mice were injected with glucose as generally described in Example 4 at 1 hour after injection of Gal3 and/or TB001. Blood was collected from the mice at 0, 30, 60, 90, and 120 minutes after the glucose injection for blood glucose measurement.

[0543] FIG. 49B shows the blood glucose levels of the mice at the tested times after glucose injection, indicating that mice injected with Gal3 alone exhibited elevated blood glucose levels compared to PBS control mice, and that the mice injected with Gal3 followed by injection with the anti-Gal3 antibody TB001 exhibited a restoration of blood glucose levels more similar to the PBS injected control mice.

[0544] In at least some of the previously described embodiments, one or more elements used in an embodiment can interchangeably be used in another embodiment unless such a replacement is not technically feasible. It will be appreciated by those skilled in the art that various other omissions, additions and modifications may be made to the methods and structures described above without departing from the scope of the claimed subject matter. All such modifications and changes are intended to fall within the scope of the subject matter, as defined by the appended claims.

[0545] With respect to the use of substantially any plural and/or singular terms herein, those having skill in the art can translate from the plural to the singular and/or from the singular to the plural as is appropriate to the context and/or application. The various singular/plural permutations may be expressly set forth herein for sake of clarity.

[0546] It will be understood by those within the art that, in general, terms used herein, and especially in the appended claims (e.g., bodies of the appended claims) are generally intended as “open” terms (e.g., the term “including” should be interpreted as “including but not limited to,” the term “having” should be interpreted as “having at least,” the term “includes” should be interpreted as “includes but is not limited to,” etc.). It will be further understood by those within the art that if a specific number of an introduced claim recitation is intended, such an intent will be explicitly recited in the claim, and in the absence of such recitation no such intent is present. For example, as an aid to understanding, the following appended claims may contain usage of the introductory phrases “at least one” and “one or more” to introduce claim recitations. However, the use of such phrases should not be construed to imply that the introduction of a claim recitation by the indefinite articles “a” or “an” limits any particular claim containing such introduced claim recitation to embodiments containing only one such recitation, even when the same claim includes the introductory phrases “one or more” or “at least one” and indefinite articles such as “a” or “an” (e.g., “a” and/or “an” should be interpreted to mean “at least one” or “one or more”); the same holds true for the use of definite articles used to introduce claim recitations. In addition, even if a specific number of an introduced claim recitation is explicitly recited, those skilled in the art will recognize that such recitation should be interpreted to mean at least the recited number (e.g., the bare recitation of “two recitations,” without other modifiers, means at least two recitations, or two or more recitations). Furthermore, in those instances where a convention analogous to “at least one of A, B, and C, etc.” is used, in general such a construction is intended in the sense one having skill in the art would understand the convention (e.g., “a system having at least one of A, B, and C” would include but not be limited to systems that have A alone, B alone, C alone, A and B together, A and C together, B and C together, and/or A, B, and C together, etc.). In those instances where a convention analogous to “at least one of A, B, or C, etc.” is used, in general such a construction is intended in the sense one having skill in the art would understand the convention (e.g., “a system having at least one of A, B, or C” would include but not be limited to systems that have A alone, B alone, C alone, A and B together, A and C together, B and C together, and/or A, B, and C together, etc.). It will be further understood by those within the art that virtually any disjunctive word and/or phrase presenting two or more alternative terms, whether in the description, claims, or drawings, should be understood to contemplate the possibilities of including one of the terms, either of the terms, or both terms. For example, the phrase “A or B” will be understood to include the possibilities of “A” or “B” or “A and B.”

[0547] In addition, where features or aspects of the disclosure are described in terms of Markush groups, those skilled in the art will recognize that the disclosure is also thereby described in terms of any individual member or subgroup of members of the Markush group.

[0548] As will be understood by one skilled in the art, for any and all purposes, such as in terms of providing a written description, all ranges disclosed herein also encompass any and all possible sub-ranges and combinations of sub-ranges thereof. Any listed range can be easily recognized as sufficiently describing and enabling the same range being broken down into at least equal halves, thirds, quarters, fifths, tenths, etc. As a non-limiting example, each range discussed herein can be readily broken down into a lower third, middle third and upper third, etc. As will also be understood by one skilled in the art all language such as “up to,” “at least,” “greater than,” “less than,” and the like include the number recited and refer to ranges which can be subsequently broken down into sub-ranges as discussed above. Finally, as will be understood by one skilled in the art, a range includes each individual member. Thus, for example, a group having 1-3 articles refers to groups having 1, 2, or 3 articles. Similarly, a group having 1-5 articles refers to groups having 1, 2, 3, 4, or 5 articles, and so forth.

[0549] While various aspects and embodiments have been disclosed herein, other aspects and embodiments will be apparent to those skilled in the art. The various aspects and embodiments disclosed herein are for purposes of illustration and are not intended to be limiting, with the true scope and spirit being indicated by the following claims.

[0550] A Sequence Listing in electronic format is submitted herewith. Some of the sequences provided in the Sequence Listing may be designated as Artificial Sequences by virtue of being non-naturally occurring fragments or portions of other sequences, including naturally occurring sequences. Some of the sequences provided in the Sequence Listing may be designated as Artificial Sequences by virtue of being combinations of sequences from different origins, such as humanized antibody sequences.

[0551] All references cited herein, including but not limited to published and unpublished applications, patents, and literature references, are incorporated herein by reference in their entirety and are hereby made a part of this specification. To the extent publications and patents or patent applications incorporated by reference contradict the disclosure contained in the specification, the specification is intended to supersede and/or take precedence over any such contradictory material.

What is claimed is:

1. An anti-Gal3 antibody or binding fragment thereof comprising (1) a heavy chain variable region comprising a V_{H}-CDR1, a V_{H}-CDR2, and a V_{H}-CDR3; and (2) a light chain variable region comprising a V_{L}-CDR1, a V_{L}-CDR2, and a V_{L}-CDR3, wherein
the V_{H}-CDR1 comprises an amino acid sequence that is SEQ ID NO: 32, 37, or 66;
the V_{H}-CDR2 comprises an amino acid sequence that is SEQ ID NO: 801, 951, 952, 77, or 108;
the V_{H}-CDR3 comprises an amino acid sequence that is SEQ ID NO: 953, 954, 802, 118, or 164;
the V_{L}-CDR1 comprises an amino acid sequence that is SEQ ID NO: 171, 178, or 215;
the V_{L}-CDR2 comprises an amino acid sequence having that is SEQ ID NO: 222, 229, or 225; and
the V_{L}-CDR3 comprises an amino acid sequence that is SEQ ID NO: 257, 256, or 291.

2.-6. (canceled)

7. A method of enhancing glucose transporter (GLUT) translocation in a cell, comprising:
contacting the cell with an anti-Gal3 antibody or binding fragment thereof,
wherein binding of the anti-Gal3 antibody or binding fragment thereof to Gal3 in the cell inhibits Gal3-mediated blocking of GLUT4 translocation.

8.-10. (canceled)

11. The method of claim 7, wherein the glucose transporter is glucose transporter 1 (GLUT1) and/or glucose transporter 4 (GLUT4).

12. (canceled)

13. The method of claim 7, wherein GLUT translocation in the cell is enhanced by at least 50% after contacting with the anti-Gal3 antibody or binding fragment thereof relative to a cell that is not contacted with the anti-Gal3 antibody or binding fragment thereof.

14. The method of claim 7, wherein the anti-Gal3 antibody or binding fragment thereof selectively binds to an N-terminal domain of Gal3.

15. The method of claim 7, wherein the anti-Gal3 antibody or binding fragment thereof binds to Peptide 1 (SEQ ID NO: 3), Peptide 6 (SEQ ID NO: 8), or Peptide 7 (SEQ ID NO:9), or any combination thereof.

16.-17. (canceled)

18. The method of claim 7, wherein the heavy chain variable region comprises a sequence having at least 80% identity to the sequence selected from SEQ ID NOs: 1067-1109, 1415-1439.

19. The method of claim 7, wherein the light chain variable region comprises a sequence having at least 80% identity to the sequence selected from SEQ ID NOs: 969-982, 1110-1152, 1440-1464.

20.-22. (canceled)

23. The method of claim 7, wherein the anti-Gal3 antibody or binding fragment thereof is selected from the group consisting of: 20H5.A3, 20H5.A3-VH3VL1, 20H5.A3-VH3VL3, 20H5.A3-VH4VL1, 20H5.A3-VH5VL1, 20H5.A3-VH5VL3, 20H5.A3-VH6VL1, 20H5.A3-VH6VL3, or binding fragment thereof.

24. The method of claim 7, wherein the anti-Gal3 antibody or binding fragment thereof is selected from the group consisting of: 2D10-VH0-VL0, 2D10-hVH4-HVL1, 2D10-hVH4-HVL2, 2D10-hVH4-HVL3, 2D10-hVH4-HVL4, 2D10-hVH3-HVL1, 2D10-hVH3-HVL2, 2D10-hVH3-HVL3, 2D10-hVH3-HVL4, or binding fragment thereof.

25. The method of claim 7, wherein the anti-Gal3 antibody or binding fragment thereof is selected from the group consisting of: 21H6-H0L0, 21H6-H1L1, 21H6-H1L2, 21H6-H1L3, 21H6-H1L4, 21H6-H2L1, 21H6-H2L2, 21H6-H2L3, 21H6-H2L4, 21H6-H3L1, 21H6-H3L2, 21H6-H3L3, 21H6-H3L4, 21H6-H4L1, 21H6-H4L2, 21H6-H4L3, 21H6-H4L4, 21H6-H5L1, 21H6-H5L2, 21H6-H5L3, 21H6-H5L4, 21H6-H6L1, 21H6-H6L2, 21H6-H6L3, 21H6-H6L4, or binding fragment thereof.

26. A method of improving insulin sensitivity in a subject in need thereof, comprising:
administering to the subject an anti-Gal3 antibody or binding fragment thereof,
wherein binding of the anti-Gal3 antibody or binding fragment thereof to Gal3 in the subject inhibits Gal3-mediated blocking of glucose transporter (GLUT) translocation in the subject, thereby improving insulin sensitivity in the subject.

27.-29. (canceled)

30. The method of claim 26, wherein the GLUT is glucose transporter 1 (GLUT1) and/or glucose transporter 4 (GLUT4).

31.-33. (canceled)

34. The method of claim 26, wherein the insulin sensitivity in the subject is improved by at least 50% relative to the insulin sensitivity of the subject prior to the administering step.

35. The method claim 26, wherein the anti-Gal3 antibody or binding fragment thereof selectively binds to an N-terminal domain of Gal3.

36. The method of claim 26, wherein the anti-Gal3 antibody or binding fragment thereof binds to Peptide 1 (SEQ ID NO: 3), Peptide 6 (SEQ ID NO: 8), or Peptide 7 (SEQ ID NO:9), or any combination thereof.

37.-38. (canceled)

39. The method of claim 26, wherein the heavy chain variable region comprises a sequence having at least 80% identity to the sequence selected from SEQ ID NOs: 955-968, 1067-1109, 1415-1439.

40. The method of claim 26, wherein the light chain variable region comprises a sequence having at least 80% identity to the sequence selected from SEQ ID NOs: 969-982, 1110-1152, 1440-1464.

41.-43. (canceled)

44. The method of claim 26, wherein the anti-Gal3 antibody or binding fragment thereof is selected from the group consisting of: 20H5.A3, 20H5.A3-VH3VL1, 20H5.A3-VH3VL3, 20H5.A3-VH4VL1, 20H5.A3-VH5VL1, 20H5.A3-VH5VL3, 20H5.A3-VH6VL1, 20H5.A3-VH6VL3, or binding fragment thereof.

45. The method of claim 26, wherein the anti-Gal3 antibody or binding fragment thereof is selected from the group consisting of: 2D10-VH0-VL0, 2D10-hVH4-HVL1, 2D10-hVH4-HVL2, 2D10-hVH4-HVL3, 2D10-hVH4-HVL4, 2D10-hVH3-HVL1, 2D10-hVH3-HVL2, 2D10-hVH3-HVL3, 2D10-hVH3-HVL4, or binding fragment thereof.

46. The method of claim 26, wherein the anti-Gal3 antibody or binding fragment thereof is selected from the group consisting of: 21H6-H0L0, 21H6-H1L1, 21H6-H1L2, 21H6-H1L3, 21H6-H1L4, 21H6-H2L1, 21H6-H2L2, 21H6-H2L3, 21H6-H2L4, 21H6-H3L1, 21H6-H3L2, 21H6-H3L3, 21H6-H3L4, 21H6-H4L1, 21H6-H4L2, 21H6-H4L3, 21H6-H4L4, 21H6-H5L1, 21H6-H5L2, 21H6-H5L3, 21H6-H5L4, 21H6-H6L1, 21H6-H6L2, 21H6-H6L3, 21H6-H6L4, or binding fragment thereof.

47. A method of treating a disease associated with insulin resistance in a subject in need thereof, comprising:
administering to the subject an anti-Gal3 antibody or binding fragment thereof,
thereby treating the disease associated with insulin resistance in the subject.

48.-55. (canceled)

56. The method of claim 47, wherein the insulin sensitivity in the subject is improved by at least 50% relative to the insulin sensitivity of the subject prior to the administering step.

57. The method of claim 47, wherein the anti-Gal3 antibody or binding fragment thereof selectively binds to an N-terminal domain of Gal3.

58. The method of claim 47, wherein the anti-Gal3 antibody or binding fragment thereof binds to Peptide 1 (SEQ ID NO: 3), Peptide 6 (SEQ ID NO: 8), or Peptide 7 (SEQ ID NO:9), or any combination thereof.

59.-60. (canceled)

61. The method of claim 47, wherein the heavy chain variable region comprises a sequence having at least 80% identity to the sequence selected from SEQ ID NOs: 955-968, 1067-1109, 1415-1439.

62. The method of claim 47, wherein the light chain variable region comprises a sequence having at least 80% identity to the sequence selected from SEQ ID NOs: 969-982, 1110-1152, 1440-1464.

63.-65. (canceled)

66. The method of claim 47, wherein the anti-Gal3 antibody or binding fragment thereof is selected from the group consisting of: 20H5.A3, 20H5.A3-VH3VL1, 20H5.A3-VH3VL3, 20H5.A3-VH4VL1, 20H5.A3-VH5VL1, 20H5.A3-VH5VL3, 20H5.A3-VH6VL1, 20H5.A3-VH6VL3, or binding fragment thereof.

67. The method of claim 47, wherein the anti-Gal3 antibody or binding fragment thereof is selected from the group consisting of: 2D10-VH0-VL0, 2D10-hVH4-HVL1, 2D10-hVH4-HVL2, 2D10-hVH4-HVL3, 2D10-hVH4-HVL4, 2D10-hVH3-HVL1, 2D10-hVH3-HVL2, 2D10-hVH3-HVL3, 2D10-hVH3-HVL4, or binding fragment thereof.

68. The method of claim 47, wherein the anti-Gal3 antibody or binding fragment thereof is selected from the group consisting of: 21H6-H0L0, 21H6-H1L1, 21H6-H1L2, 21H6-H1L3, 21H6-H1L4, 21H6-H2L1, 21H6-H2L2, 21H6-H2L3, 21H6-H2L4, 21H6-H3L1, 21H6-H3L2, 21H6-H3L3, 21H6-H3L4, 21H6-H4L1, 21H6-H4L2, 21H6-H4L3, 21H6-H4L4, 21H6-H5L1, 21H6-H5L2, 21H6-H5L3, 21H6-H5L4, 21H6-H6L1, 21H6-H6L2, 21H6-H6L3, 21H6-H6L4, or binding fragment thereof.

The application's sequence listing, which the Patent Office published only in electronic form, follows.

SEQUENCE LISTING (1618 sequences)

SEQ ID NO: 1 - protein, 250 aa, Homo sapiens [sequence omitted]

SEQ ID NO: 2 - protein, 264 aa, Homo sapiens
MHSKTPCGCFKPWKMADNFSLHDALSGSGNPNPQGWPGAWGNQPAGAGGYPGASYPGAYPGQAPPGAYPGQAPPGAYPGAPGAYPGAPAPGVYPGPPSGPGAYPSSGQPSATGAYPATGPYGAPAGPLIVPYNLPLPGGVVPRMLITILGTVKPNANRIALDFQRGNDVAFHFNPRFNENNRRVIVCNTKLDNNWGREERQSVFPFESGKPFKIQVLVEPDHFKVAVNDAHLLQYNHRVKKLNEISKLGISGDIDLTSASYTMI

SEQ ID NO: 3 - protein, 20 aa, Artificial Sequence
  Gal3 Peptide 1
ADNFSLHDALSGSGNPNPQG

SEQ ID NO: 4 - protein, 20 aa, Artificial Sequence
  Gal3 Peptide 2
SGSGNPNPQGWPGAWGNQPA

SEQ ID NO: 5 - protein, 20 aa, Artificial Sequence
  Gal3 Peptide 3
WPGAWGNQPAGAGGYPGASY

SEQ ID NO: 6 - protein, 20 aa, Artificial Sequence
  Gal3 Peptide 4
GAGGYPGASYPGAYPGQAPP

SEQ ID NO: 7 - protein, 20 aa, Artificial Sequence
  Gal3 Peptide 5
PGAYPGQAPPGAYPGQAPPG

SEQ ID NO: 8 - protein, 20 aa, Artificial Sequence
  Gal3 Peptide 6
GAYPGQAPPGAYPGAPGAYP

SEQ ID NO: 9 - protein, 20 aa, Artificial Sequence
  Gal3 Peptide 7
AYPGAPGAYPGAPAPGVYPG

SEQ ID NO: 10 - protein, 20 aa, Artificial Sequence
  Gal3 Peptide 8
GAPAPGVYPGPPSGPGAYPS

SEQ ID NO: 11 - protein, 20 aa, Artificial Sequence
  Gal3 Peptide 9
PPSGPGAYPSSGQPSATGAY

SEQ ID NO: 12 - protein, 20 aa, Artificial Sequence
  Gal3 Peptide 10
SGQPSATGAYPATGPYGAPA

SEQ ID NO: 13 - protein, 20 aa, Artificial Sequence
  Gal3 Peptide 11
PATGPYGAPAGPLIVPYNLP

SEQ ID NO: 14 - protein, 20 aa, Artificial Sequence
  Gal3 Peptide 12
GPLIVPYNLPLPGGVVPRML

SEQ ID NO: 15 - protein, 20 aa, Artificial Sequence
  Gal3 Peptide 13
LPGGVVPRMLITILGTVKPN

SEQ ID NO: 16 - protein, 20 aa, Artificial Sequence
  Gal3 Peptide 14
ITILGTVKPNANRIALDFQR

SEQ ID NO: 17 - protein, 20 aa, Artificial Sequence
  Gal3 Peptide 15
ANRIALDFQRGNDVAFHFNP

SEQ ID NO: 18 - protein, 20 aa, Artificial Sequence
  Gal3 Peptide 16
GNDVAFHFNPRFNENNRRVI

SEQ ID NO: 19 - protein, 20 aa, Artificial Sequence
  Gal3 Peptide 17
RFNENNRRVIVCNTKLDNNW

SEQ ID NO: 20 - protein, 20 aa, Artificial Sequence
  Gal3 Peptide 18
VCNTKLDNNWGREERQSVFP

SEQ ID NO: 21 - protein, 20 aa, Artificial Sequence
  Gal3 Peptide 19
GREERQSVFPFESGKPFKIQ

SEQ ID NO: 22 - protein, 20 aa, Artificial Sequence
  Gal3 Peptide 20
FESGKPFKIQVLVEPDHFKV

SEQ ID NO: 23 - protein, 20 aa, Artificial Sequence
  Gal3 Peptide 21
VLVEPDHFKVAVNDAHLLQY

SEQ ID NO: 24 - protein, 20 aa, Artificial Sequence
  Gal3 Peptide 22
AVNDAHLLQYNHRVKKLNEI

SEQ ID NO: 25 - protein, 20 aa, Artificial Sequence
  Gal3 Peptide 23
NHRVKKLNEISKLGISGDID

SEQ ID NO: 26 - protein, 19 aa, Artificial Sequence
  Gal3 Peptide 24
SKLGISGDIDLTSASYTMI

SEQ ID NO: 27 - protein, 7 aa, Artificial Sequence
  VH_CDR1_1
GYTFTNY

SEQ ID NO: 28 - protein, 7 aa, Artificial Sequence
  VH_CDR1_2
GFSLTSY

SEQ ID NO: 29 - protein, 8 aa, Artificial Sequence
  VH_CDR1_3
GYTFTNYW

SEQ ID NO: 30 - protein, 8 aa, Artificial Sequence
  VH_CDR1_4
GYTFTNYG

SEQ ID NO: 31 - protein, 7 aa, Artificial Sequence
  VH_CDR1_5
GYSFTNY

SEQ ID NO: 32 - protein, 7 aa, Artificial Sequence
  VH_CDR1_6
GYTFTDY

SEQ ID NO: 33 - protein, 7 aa, Artificial Sequence
  VH_CDR1_7
GYKFKTY

SEQ ID NO: 34 - protein, 7 aa, Artificial Sequence
  VH_CDR1_8
GYTFTTY

SEQ ID NO: 35 - protein, 7 aa, Artificial Sequence
  VH_CDR1_9
GFAFSSY

SEQ ID NO: 36 - protein, 7 aa, Artificial Sequence
  VH_CDR1_10
GYTFTDF

SEQ ID NO: 37 - protein, 7 aa, Artificial Sequence
  VH_CDR1_11
GYAFTTY

SEQ ID NO: 38 - protein, 7 aa, Artificial Sequence
  VH_CDR1_12
GFTFSSY

SEQ ID NO: 39 - protein, 8 aa, Artificial Sequence
  VH_CDR1_13
GFSLTSYG

SEQ ID NO: 40 - protein, 7 aa, Artificial Sequence
  VH_CDR1_14
GYTFTSY

SEQ ID NO: 41 - protein, 7 aa, Artificial Sequence
  VH_CDR1_15
GYTFSDY

SEQ ID NO: 42 - protein, 8 aa, Artificial Sequence
  VH_CDR1_16
GYTFTNFG

SEQ ID NO: 43 - protein, 8 aa, Artificial Sequence
  VH_CDR1_17
GFTFSSYA

SEQ ID NO: 44 - protein, 10 aa, Artificial Sequence
  VH_CDR1_18
GFSLSTSGMG

SEQ ID NO: 45 - protein, 8 aa, Artificial Sequence
  VH_CDR1_19
GFTFSNYG

SEQ ID NO: 46 - protein, 8 aa, Artificial Sequence
  VH_CDR1_20
GYIFTNYG

SEQ ID NO: 47 - protein, 8 aa, Artificial Sequence
  VH_CDR1_21
GNTFTDHN

SEQ ID NO: 48 - protein, 8 aa, Artificial Sequence
  VH_CDR1_22
GYTFTSYW

SEQ ID NO: 49 - protein, 10 aa, Artificial Sequence
  VH_CDR1_23
GFSLSTFGMG

SEQ ID NO: 50 - protein, 8 aa, Artificial Sequence
  VH_CDR1_24
GYTFTSYD

SEQ ID NO: 51 - protein, 8 aa, Artificial Sequence
  VH_CDR1_25
GFTFSNYW

SEQ ID NO: 52 - protein, 8 aa, Artificial Sequence
  VH_CDR1_26
GYTFTSYV

SEQ ID NO: 53 - protein, 8 aa, Artificial Sequence
  VH_CDR1_27
GYSFTNYI

SEQ ID NO: 54 - protein, 8 aa, Artificial Sequence
  VH_CDR1_28
GYTFRSYD

SEQ ID NO: 55 - protein, 8 aa, Artificial Sequence
  VH_CDR1_29
GFTFSNFW

SEQ ID NO: 56 - protein, 8 aa, Artificial Sequence
  VH_CDR1_30
EYAFNNYM

SEQ ID NO: 57 - protein, 8 aa, Artificial Sequence
  VH_CDR1_31
GYSFTGYT

SEQ ID NO: 58 - protein, 8 aa, Artificial Sequence
  VH_CDR1_32
GFSLINYG

SEQ ID NO: 59 - protein, 8 aa, Artificial Sequence
  VH_CDR1_33
GYTFNNYW

SEQ ID NO: 60 - protein, 8 aa, Artificial Sequence
  VH_CDR1_34
GFSLSSYG

SEQ ID NO: 61 - protein, 8 aa, Artificial Sequence
  VH_CDR1_35
GYSFTNYW

SEQ ID NO: 62 - protein, 8 aa, Artificial Sequence
  VH_CDR1_36
GYSFTSYW

SEQ ID NO: 63 - protein, 9 aa, Artificial Sequence
  VH_CDR1_37
GYSITSGYY

SEQ ID NO: 64 - protein, 8 aa, Artificial Sequence
  VH_CDR1_38
GFNIKDYY

SEQ ID NO: 65 - protein, 8 aa, Artificial Sequence
  VH_CDR1_39
RYTFTDYN

SEQ ID NO: 66 - protein, 8 aa, Artificial Sequence
  VH_CDR1_40
GYTFTIFG

SEQ ID NO: 67 - protein, 8 aa, Artificial Sequence
  VH_CDR1_41
GYTFTSSW

SEQ ID NO: 68 - protein, 8 aa, Artificial Sequence
  VH_CDR1_42
GYTFTGYW

SEQ ID NO: 69 - protein, 8 aa, Artificial Sequence
  VH_CDR1_43
GYSFTDYN

SEQ ID NO: 70 - protein, 8 aa, Artificial Sequence
  VH_CDR1_44
GFSLTIYG

SEQ ID NO: 71 - protein, 6 aa, Artificial Sequence
  VH_CDR2_1
NTNTGE

SEQ ID NO: 72 - protein, 8 aa, Artificial Sequence
  VH_CDR2_2
IYPGSGNT

SEQ ID NO: 73 - protein, 8 aa, Artificial Sequence
  VH_CDR2_3
IYPGTGNT

SEQ ID NO: 74 - protein, 8 aa, Artificial Sequence
  VH_CDR2_4
INTYSGVP

SEQ ID NO: 75 - protein, 8 aa, Artificial Sequence
  VH_CDR2_5
ISDGGVYT

SEQ ID NO: 76 - protein, 8 aa, Artificial Sequence
  VH_CDR2_6
INPKNGGI

SEQ ID NO: 77 - protein, 8 aa, Artificial Sequence
  VH_CDR2_7
VNTYSGVP

SEQ ID NO: 78 - protein, 8 aa, Artificial Sequence
  VH_CDR2_8
IYPGSNDT

SEQ ID NO: 79 - protein, 8 aa, Artificial Sequence
  VH_CDR2_9
ISDGGIYT

SEQ ID NO: 80 - protein, 8 aa, Artificial Sequence
  VH_CDR2_10
INTHSGVP

SEQ ID NO: 81 - protein, 7 aa, Artificial Sequence
  VH_CDR2_11
IWSGGST

SEQ ID NO: 82 - protein, 8 aa, Artificial Sequence
  VH_CDR2_12
IDPSDSET

SEQ ID NO: 83 - protein, 8 aa, Artificial Sequence
  VH_CDR2_13
IHPNSGST

SEQ ID NO: 84 - protein, 8 aa, Artificial Sequence
  VH_CDR2_14
INPNNGGT

SEQ ID NO: 85 - protein, 8 aa, Artificial Sequence
  VH_CDR2_15
IYPVSVNT

SEQ ID NO: 86 - protein, 8 aa, Artificial Sequence
  VH_CDR2_16
INTYTGEP

SEQ ID NO: 87 - protein, 7 aa, Artificial Sequence
  VH_CDR2_17
ISSGGDT

SEQ ID NO: 88 - protein, 7 aa, Artificial Sequence
  VH_CDR2_18
IWWDDDK

SEQ ID NO: 89 - protein, 8 aa, Artificial Sequence
  VH_CDR2_19
ISSGGSYT

SEQ ID NO: 90 - protein, 8 aa, Artificial Sequence
  VH_CDR2_20
IYPYNGGT

SEQ ID NO: 91 - protein, 7 aa, Artificial Sequence
  VH_CDR2_21
ISSGGST

SEQ ID NO: 92 - protein, 8 aa, Artificial Sequence
  VH_CDR2_22
IYPGSSSI

SEQ ID NO: 93 - protein, 8 aa, Artificial Sequence
  VH_CDR2_23
IYPGDGST

SEQ ID NO: 94 - protein, 10 aa, Artificial Sequence
  VH_CDR2_24
IRLKSNNYAT

SEQ ID NO: 95 - protein, 8 aa, Artificial Sequence
  VH_CDR2_25
INTNTGES

SEQ ID NO: 96 - protein, 10 aa, Artificial Sequence
  VH_CDR2_26
LRLKSNNYAT

SEQ ID NO: 97 - protein, 8 aa, Artificial Sequence
  VH_CDR2_27
INPYNDGT

SEQ ID NO: 98 - protein, 8 aa, Artificial Sequence
  VH_CDR2_28
IFPGEGIS

SEQ ID NO: 99 - protein, 8 aa, Artificial Sequence
  VH_CDR2_29
IFPGDGTT

SEQ ID NO: 100 - protein, 8 aa, Artificial Sequence
  VH_CDR2_30
INPGSGAT

SEQ ID NO: 101 - protein, 8 aa, Artificial Sequence
  VH_CDR2_31
INPYNGGT

SEQ ID NO: 102 - protein, 8 aa, Artificial Sequence
  VH_CDR2_32
FLPGDGSS

SEQ ID NO: 103 - protein, 7 aa, Artificial Sequence
  VH_CDR2_33
IWAGGST

SEQ ID NO: 104 - protein, 8 aa, Artificial Sequence
  VH_CDR2_34
INTNTGEP

SEQ ID NO: 105 - protein, 7 aa, Artificial Sequence
  VH_CDR2_35
ISYDGRN

SEQ ID NO: 106 - protein, 8 aa, Artificial Sequence
  VH_CDR2_36
IYPEDDET

SEQ ID NO: 107 - protein, 8 aa, Artificial Sequence
  VH_CDR2_37
IYPNNGGT

SEQ ID NO: 108 - protein, 8 aa, Artificial Sequence
  VH_CDR2_38
VNTYTGEP

SEQ ID NO: 109 - protein, 8 aa, Artificial Sequence
  VH_CDR2_39
IDPYNDAT

SEQ ID NO: 110 - protein, 7 aa, Artificial Sequence
  VH_CDR2_40
VAWDDKK

SEQ ID NO: 111 - protein, 7 aa, Artificial Sequence
  VH_CDR2_41
ISSGDSP

SEQ ID NO: 112 - protein, 9 aa, Artificial Sequence
  VH_CDR3_1
APYDNFFAY

SEQ ID NO: 113 - protein, 9 aa, Artificial Sequence
  VH_CDR3_2
STAPGGFDV

SEQ ID NO: 114 - protein, 15 aa, Artificial Sequence
  VH_CDR3_3
ARFAYYYGSGGYFDY

SEQ ID NO: 115 - protein, 12 aa, Artificial Sequence
  VH_CDR3_4
ARDGNYGDPMDY

SEQ ID NO: 116 - protein, 10 aa, Artificial Sequence
  VH_CDR3_5
STPYEYDGAY

SEQ ID NO: 117 - protein, 6 aa, Artificial Sequence
  VH_CDR3_6
VRDGGY

SEQ ID NO: 118 - protein, 9 aa, Artificial Sequence
  VH_CDR3_7
ARGPYAMDY

SEQ ID NO: 119 - protein, 8 aa, Artificial Sequence
  VH_CDR3_8
TSGYGFPY

SEQ ID NO: 120 - protein, 13 aa, Artificial Sequence
  VH_CDR3_9
ANYFGCSGWFFDV

SEQ ID NO: 121 - protein, 12 aa, Artificial Sequence
  VH_CDR3_10
TRDGNDGDAMDN

SEQ ID NO: 122 - protein, 14 aa, Artificial Sequence
  VH_CDR3_11
AKGPYDYDLGWFAY

SEQ ID NO: 123 - protein, 8 aa, Artificial Sequence
  VH_CDR3_12
ARHGYYDY

SEQ ID NO: 124 - protein, 12 aa, Artificial Sequence
  VH_CDR3_13
TRWGIYYYARDY

SEQ ID NO: 125 - protein, 10 aa, Artificial Sequence
  VH_CDR3_14
AVPYEYDGAY

SEQ ID NO: 126 - protein, 10 aa, Artificial Sequence
  VH_CDR3_15
ATPYEYDGAY

SEQ ID NO: 127 - protein, 5 aa, Artificial Sequence
  VH_CDR3_16
AYLDY

SEQ ID NO: 128 - protein, 14 aa, Artificial Sequence
  VH_CDR3_17
AKSPDGYDVAWFGY

SEQ ID NO: 129 - protein, 15 aa, Artificial Sequence
  VH_CDR3_18
ARWGGYAGDYYAMDF

SEQ ID NO: 130 - protein, 15 aa, Artificial Sequence
  VH_CDR3_19
ARWGGYDGDYYAMDY

SEQ ID NO: 131 - protein, 15 aa, Artificial Sequence
  VH_CDR3_20
ARWGGYAGDYYAMDY

SEQ ID NO: 132 - protein, 10 aa, Artificial Sequence
  VH_CDR3_21
ASYGNSLFDY

SEQ ID NO: 133 - protein, 7 aa, Artificial Sequence
  VH_CDR3_22
VRYTMDY

SEQ ID NO: 134 - protein, 16 aa, Artificial Sequence
  VH_CDR3_23
ARNLYDGSYGYYAMDY

SEQ ID NO: 135 - protein, 16 aa, Artificial Sequence
  VH_CDR3_24
ARHAHYYGVSPYYFDY

SEQ ID NO: 136 - protein, 12 aa, Artificial Sequence
  VH_CDR3_25
AKFGNYVGAMDY

SEQ ID NO: 137 - protein, 13 aa, Artificial Sequence
  VH_CDR3_26
ARGEYDYLAWFAY

SEQ ID NO: 138 - protein, 11 aa, Artificial Sequence
  VH_CDR3_27
TRFTTVVEMDY

SEQ ID NO: 139 - protein, 5 aa, Artificial Sequence
  VH_CDR3_28
ARWGY

SEQ ID NO: 140 - protein, 13 aa, Artificial Sequence
  VH_CDR3_29
ARIDYGDYVGFAY

SEQ ID NO: 141 - protein, 11 aa, Artificial Sequence
  VH_CDR3_30
AREAASNAMDY

SEQ ID NO: 142 - protein, 13 aa, Artificial Sequence
  VH_CDR3_31
TRHYGFPYWYFDV

SEQ ID NO: 143 - protein, 11 aa, Artificial Sequence
  VH_CDR3_32
QPGGVTGTLTT

SEQ ID NO: 144 - protein, 7 aa, Artificial Sequence
  VH_CDR3_33
ARYPMDY

SEQ ID NO: 145 - protein, 11 aa, Artificial Sequence
  VH_CDR3_34
ARLLFYYAMDY

SEQ ID NO: 146 - protein, 11 aa, Artificial Sequence
  VH_CDR3_35
AREATAGAMDY

SEQ ID NO: 147 - protein, 11 aa, Artificial Sequence
  VH_CDR3_36
AREGAGSWFAY

SEQ ID NO: 148 - protein, 7 aa, Artificial Sequence
  VH_CDR3_37
TYNDLGY

SEQ ID NO: 149 - protein, 16 aa, Artificial Sequence
  VH_CDR3_38
ARKDDYYGSSPYALDY

SEQ ID NO: 150 - protein, 9 aa, Artificial Sequence
  VH_CDR3_39
VRDDYDSDY

SEQ ID NO: 151 - protein, 14 aa, Artificial Sequence
  VH_CDR3_40
ARIYYYGRGYAMDY

SEQ ID NO: 152 - protein, 15 aa, Artificial Sequence
  VH_CDR3_41
ARGDYYYGTRGPMDY

SEQ ID NO: 153 - protein, 8 aa, Artificial Sequence
  VH_CDR3_42
ARWGAMDY

SEQ ID NO: 154 - protein, 15 aa, Artificial Sequence
  VH_CDR3_43
ARDRASLLRPGAMDY

SEQ ID NO: 155 - protein, 11 aa, Artificial Sequence
  VH_CDR3_44
ARLDYDYDEDY

SEQ ID NO: 156 - protein, 14 aa, Artificial Sequence
  VH_CDR3_45
ASPPSGYDYDVFAS

SEQ ID NO: 157 - protein, 14 aa, Artificial Sequence
  VH_CDR3_46
ASPPSGYDYDVFAY

SEQ ID NO: 158 - protein, 14 aa, Artificial Sequence
  VH_CDR3_47
AKPPYDYDGAWFAY

SEQ ID NO: 159 - protein, 7 aa, Artificial Sequence
  VH_CDR3_48
ATGRPDY

SEQ ID NO: 160 - protein, 7 aa, Artificial Sequence
  VH_CDR3_49
AKGRPDY

SEQ ID NO: 161 - protein, 11 aa, Artificial Sequence
  VH_CDR3_50
AGYDFLWYFDV

SEQ ID NO: 162 - protein, 12 aa, Artificial Sequence
  VH_CDR3_51
ARSGGYYVWFAY

SEQ ID NO: 163 - protein, 14 aa, Artificial Sequence
  VH_CDR3_52
ARSYYDGSYDAMDY

SEQ ID NO: 164 - protein, 7 aa, Artificial Sequence
  VH_CDR3_53
ARGWFAY

SEQ ID NO: 165 - protein, 14 aa, Artificial Sequence
  VH_CDR3_54
AKPPHDYDQAWFAY

SEQ ID NO: 166 - protein, 9 aa, Artificial Sequence
  VH_CDR3_55
VNSNYESGY

SEQ ID NO: 167 - protein, 9 aa, Artificial Sequence
  VH_CDR3_56
ANSNYASGS

SEQ ID NO: 168 - protein, 13 aa, Artificial Sequence
  VH_CDR3_57
ARWGRYEYYAMDY

SEQ ID NO: 169 - protein, 9 aa, Artificial Sequence
  VH_CDR3_58
TMTGGPINY

SEQ ID NO: 170 - protein, 16 aa, Artificial Sequence
  VL-CDR1_1
RSSKSLLYKDGKTYLN

SEQ ID NO: 171 - protein, 11 aa, Artificial Sequence
  VL-CDR1_2
KSLLHSDGITY

SEQ ID NO: 172 - protein, 6 aa, Artificial Sequence
  VL-CDR1_3
QGINSN

SEQ ID NO: 173 - protein, 11 aa, Artificial Sequence
  VL-CDR1_4
QSLLYTNGKTY

SEQ ID NO: 174 - protein, 11 aa, Artificial Sequence
  VL-CDR1_5
QSLFDSDGKTY

SEQ ID NO: 175 - protein, 11 aa, Artificial Sequence
  VL-CDR1_6
QSIVHNNGNTY

SEQ ID NO: 176 - protein, 6 aa, Artificial Sequence
  VL-CDR1_7
QGINNY

SEQ ID NO: 177 - protein, 6 aa, Artificial Sequence
  VL-CDR1_8
QNIYIW

SEQ ID NO: 178 - protein, 6 aa, Artificial Sequence
  VL-CDR1_9
QDISNY

SEQ ID NO: 179 - protein, 11 aa, Artificial Sequence
  VL-CDR1_10
QSIVHSNGNTY

SEQ ID NO: 180 - protein, 11 aa, Artificial Sequence
  VL-CDR1_11
QSLLYTDGKTY

SEQ ID NO: 181 - protein, 6 aa, Artificial Sequence
  VL-CDR1_12
QSVSND

SEQ ID NO: 182 - protein, 6 aa, Artificial Sequence
  VL-CDR1_13
QGISNY

SEQ ID NO: 183 - protein, 6 aa, Artificial Sequence
  VL-CDR1_14
QDVSTA

SEQ ID NO: 184 - protein, 6 aa, Artificial Sequence
  VL-CDR1_15
QNVGTN

SEQ ID NO: 185 - protein, 11 aa, Artificial Sequence
  VL-CDR1_16
QSLFHSDGKTY

SEQ ID NO: 186 - protein, 6 aa, Artificial Sequence
  VL-CDR1_17
QNINIW

SEQ ID NO: 187 - protein, 11 aa, Artificial Sequence
  VL-CDR1_18
QSLLHSDGKTY

SEQ ID NO: 188 - protein, 6 aa, Artificial Sequence
  VL-CDR1_19
QDVRTA

SEQ ID NO: 189 - protein, 12 aa, Artificial Sequence
  VL-CDR1_20
QSVLYSSNQKNY

SEQ ID NO: 190 - protein, 12 aa, Artificial Sequence
  VL-CDR1_21
QSVLYSSSQKNY

SEQ ID NO: 191 - protein, 11 aa, Artificial Sequence
  VL-CDR1_22
QSLVHNSGNTY

SEQ ID NO: 192 - protein, 9 aa, Artificial Sequence
  VL-CDR1_23
TGAVTTSNY

SEQ ID NO: 193 - protein, 11 aa, Artificial Sequence
  VL-CDR1_24
KSLLHTNGITF

SEQ ID NO: 194 - protein, 12 aa, Artificial Sequence
  VL-CDR1_25
QSLLNSSNQKNY

SEQ ID NO: 195 - protein, 6 aa, Artificial Sequence
  VL-CDR1_26
QNINVW

SEQ ID NO: 196 - protein, 6 aa, Artificial Sequence
  VL-CDR1_27
IDIDDD

SEQ ID NO: 197 - protein, 11 aa, Artificial Sequence
  VL-CDR1_28
QDIVHSSGNTY

SEQ ID NO: 198 - protein, 11 aa, Artificial Sequence
  VL-CDR1_29
KSLLYSNGITY

SEQ ID NO: 199 - protein, 10 aa, Artificial Sequence
  VL-CDR1_30
KSVSTSGYSY

SEQ ID NO: 200 - protein, 10 aa, Artificial Sequence
  VL-CDR1_31
ESVDSYGNSF

SEQ ID NO: 201 - protein, 11 aa, Artificial Sequence
  VL-CDR1_32
QSLLYSNGKTY

SEQ ID NO: 202 - protein, 6 aa, Artificial Sequence
  VL-CDR1_33
QGISSN

SEQ ID NO: 203 - protein, 10 aa, Artificial Sequence
  VL-CDR1_34
KSVSTSGYSC

SEQ ID NO: 204 - protein, 11 aa, Artificial Sequence
  VL-CDR1_35
QSLLYSDGKTY

SEQ ID NO: 205 - protein, 10 aa, Artificial Sequence
  VL-CDR1_36
ESVENHVNSF

SEQ ID NO: 206 - protein, 5 aa, Artificial Sequence
  VL-CDR1_37
SSVTY

SEQ ID NO: 207 - protein, 10 aa, Artificial Sequence
  VL-CDR1_38
ESLDNSGISF

SEQ ID NO: 208 - protein, 6 aa, Artificial Sequence
  VL-CDR1_39
QDVSTT

SEQ ID NO: 209 - protein, 6 aa, Artificial Sequence
  VL-CDR1_40
QNVGIN

SEQ ID NO: 210 - protein, 11 aa, Artificial Sequence
  VL-CDR1_41
QSLLDSDGKTY

SEQ ID NO: 211 - protein, 6 aa, Artificial Sequence
  VL-CDR1_42
GNIHNY

SEQ ID NO: 212 - protein, 6 aa, Artificial Sequence
  VL-CDR1_43
QSVSSD

SEQ ID NO: 213 - protein, 11 aa, Artificial Sequence
  VL-CDR1_44
QSLLYINGKTY

SEQ ID NO: 214 - protein, 11 aa, Artificial Sequence
  VL-CDR1_45
RSLLHSNGYTY

SEQ ID NO: 215 - protein, 11 aa, Artificial Sequence
  VL-CDR1_46
RSLLDSDGKTY

SEQ ID NO: 216 - protein, 6 aa, Artificial Sequence
  VL-CDR1_47
QDVSSV

SEQ ID NO: 217 - protein, 6 aa, Artificial Sequence
  VL-CDR1_48
QIINNN

SEQ ID NO: 218 - protein, 10 aa, Artificial Sequence
  VL-CDR1_49
KSVTTSAYSY

SEQ ID NO: 219 - protein, 11 aa, Artificial Sequence
  VL-CDR1_50
QSLLDRDGKTY

SEQ ID NO: 220 - protein, 6 aa, Artificial Sequence
  VL-CDR1_51
QSVSNE

SEQ ID NO: 221 - protein, 7 aa, Artificial Sequence
  VL-CDR2_1
LMSTHAS

SEQ ID NO: 222 - protein, 3 aa, Artificial Sequence
  VL-CDR2_2
RMS

SEQ ID NO: 223 - protein, 3 aa, Artificial Sequence
  VL-CDR2_3
HAT

SEQ ID NO: 224 - protein, 3 aa, Artificial Sequence
  VL-CDR2_4
LLS

SEQ ID NO: 225 - protein, 3 aa, Artificial Sequence
  VL-CDR2_5
LVS

SEQ ID NO: 226 - protein, 3 aa, Artificial Sequence
  VL-CDR2_6
KVS

SEQ ID NO: 227 - protein, 3 aa, Artificial Sequence
  VL-CDR2_7
YAS

SEQ ID NO: 228 - protein, 3 aa, Artificial Sequence
  VL-CDR2_8
KAS

SEQ ID NO: 229 - protein, 3 aa, Artificial Sequence
  VL-CDR2_9
YTS

SEQ ID NO: 230 - protein, 3 aa, Artificial Sequence
  VL-CDR2_10
WAS

SEQ ID NO: 231 - protein, 3 aa, Artificial Sequence
  VL-CDR2_11
GAS

SEQ ID NO: 232 - protein, 3 aa, Artificial Sequence
  VL-CDR2_12
GIN

SEQ ID NO: 233 - protein, 3 aa, Artificial Sequence
  VL-CDR2_13
QMS

SEQ ID NO: 234 - protein, 3 aa, Artificial Sequence
  VL-CDR2_14
FAS

SEQ ID NO: 235 - protein, 3 aa, Artificial Sequence
  VL-CDR2_15
EGN

SEQ ID NO: 236 - protein, 3 aa, Artificial Sequence
  VL-CDR2_16
GTN

SEQ ID NO: 237 - protein, 3 aa, Artificial Sequence
  VL-CDR2_17
LAS

SEQ ID NO: 238 - protein, 3 aa, Artificial Sequence
  VL-CDR2_18
LVC

SEQ ID NO: 239 - protein, 3 aa, Artificial Sequence
  VL-CDR2_19
HGT

SEQ ID NO: 240 - protein, 3 aa, Artificial Sequence
  VL-CDR2_20
YGT

SEQ ID NO: 241 - protein, 3 aa, Artificial Sequence
  VL-CDR2_21
RAS

SEQ ID NO: 242 - protein, 3 aa, Artificial Sequence
  VL-CDR2_22
ATS

SEQ ID NO: 243 - protein, 3 aa, Artificial Sequence
  VL-CDR2_23
AAS

SEQ ID NO: 244 - protein, 3 aa, Artificial Sequence
  VL-CDR2_24
SAS

SEQ ID NO: 245 - protein, 3 aa, Artificial Sequence
  VL-CDR2_25
NVK

SEQ ID NO: 246 - protein, 3 aa, Artificial Sequence
  VL-CDR2_26
SAK

SEQ ID NO: 247 - protein, 3 aa, Artificial Sequence
  VL-CDR2_27
QAS

SEQ ID NO: 248 - protein, 9 aa, Artificial Sequence
  VL-CDR3_1
QQLVDYPLT

SEQ ID NO: 249 - protein, 9 aa, Artificial Sequence
  VL-CDR3_2
AQMLEFPLT

SEQ ID NO: 250 - protein, 9 aa, Artificial Sequence
  VL-CDR3_3
VQYAQFPPT

SEQ ID NO: 251 - protein, 9 aa, Artificial Sequence
  VL-CDR3_4
LQSTHFPLT

SEQ ID NO: 252 - protein, 9 aa, Artificial Sequence
  VL-CDR3_5
WQGTHFPLT

SEQ ID NO: 253 - protein, 9 aa, Artificial Sequence
  VL-CDR3_6
FQGSHVPLT

SEQ ID NO: 254 - protein, 9 aa, Artificial Sequence
  VL-CDR3_7
QQYSQVPYT

SEQ ID NO: 255 - protein, 9 aa, Artificial Sequence
  VL-CDR3_8
LQGQSYPLT

SEQ ID NO: 256 - protein, 9 aa, Artificial Sequence
  VL-CDR3_9
QQYSKLPYT

SEQ ID NO: 257 - protein, 9 aa, Artificial Sequence
  VL-CDR3_10
AQMIEFPLT

SEQ ID NO: 258 - protein, 9 aa, Artificial Sequence
  VL-CDR3_11
QQDYTSPYT

SEQ ID NO: 259 - protein, 9 aa, Artificial Sequence
  VL-CDR3_12
QQYSELPYT

SEQ ID NO: 260 - protein, 9 aa, Artificial Sequence
  VL-CDR3_13
QQHYTTPLT

SEQ ID NO: 261 - protein, 9 aa, Artificial Sequence
  VL-CDR3_14
EQYSNFPLT

SEQ ID NO: 262 - protein, 9 aa, Artificial Sequence
  VL-CDR3_15
QQYSSYPWT

SEQ ID NO: 263 - protein, 8 aa, Artificial Sequence
  VL-CDR3_16
HQYLSSLT

SEQ ID NO: 264 - protein, 9 aa, Artificial Sequence
  VL-CDR3_17
SQSTHVPPT

SEQ ID NO: 265 - protein, 9 aa, Artificial Sequence
  VL-CDR3_18
ALWYSNHWV

SEQ ID NO: 266 - protein, 9 aa, Artificial Sequence
  VL-CDR3_19
AQNLELPWT

SEQ ID NO: 267 - protein, 9 aa, Artificial Sequence
  VL-CDR3_20
QQHYSTPYT

SEQ ID NO: 268 - protein, 9 aa, Artificial Sequence
  VL-CDR3_21
QQGQSYPYT

SEQ ID NO: 269 - protein, 9 aa, Artificial Sequence
  VL-CDR3_22
LQSDNKPLT

SEQ ID NO: 270 - protein, 9 aa, Artificial Sequence
  VL-CDR3_23
ALWYSNHLV

SEQ ID NO: 271 - protein, 9 aa, Artificial Sequence
  VL-CDR3_24
FQGSHVPPT

SEQ ID NO: 272 - protein, 9 aa, Artificial Sequence
  VL-CDR3_25
QHSRELPLT

SEQ ID NO: 273 - protein, 9 aa, Artificial Sequence
  VL-CDR3_26
QQNNEDPWT

SEQ ID NO: 274 - protein, 9 aa, Artificial Sequence
  VL-CDR3_27
VQGTHFPQT

SEQ ID NO: 275 - protein, 9 aa, Artificial Sequence
  VL-CDR3_28
VQYDQFPWT

SEQ ID NO: 276 - protein, 9 aa, Artificial Sequence
  VL-CDR3_29
HHSTELPYT

SEQ ID NO: 277 - protein, 8 aa, Artificial Sequence
  VL-CDR3_30
VQGTHLPT

SEQ ID NO: 278 - protein, 9 aa, Artificial Sequence
  VL-CDR3_31
QQNNEVPYT

SEQ ID NO: 279 - protein, 9 aa, Artificial Sequence
  VL-CDR3_32
QQWSSNPLT

SEQ ID NO: 280 - protein, 9 aa, Artificial Sequence
  VL-CDR3_33
QHSKEVPWT

SEQ ID NO: 281 - protein, 9 aa, Artificial Sequence
  VL-CDR3_34
QQHYSPPFT

SEQ ID NO: 282 - protein, 9 aa, Artificial Sequence
  VL-CDR3_35
QQYNSYPYT

SEQ ID NO: 283 - protein, 9 aa, Artificial Sequence
  VL-CDR3_36
WQGTHFPFT

SEQ ID NO: 284 - protein, 9 aa, Artificial Sequence
  VL-CDR3_37
QHFWSIFPT

SEQ ID NO: 285 - protein, 9 aa, Artificial Sequence
  VL-CDR3_38
QHFWSLFPT

SEQ ID NO: 286 - protein, 9 aa, Artificial Sequence
  VL-CDR3_39
QHNYISPFT

SEQ ID NO: 287 - protein, 9 aa, Artificial Sequence
  VL-CDR3_40
QQHYNTPYT

SEQ ID NO: 288 - protein, 9 aa, Artificial Sequence
  VL-CDR3_41
LQSTHFPQT

SEQ ID NO: 289 - protein, 9 aa, Artificial Sequence
  VL-CDR3_42
MQHLEYPYT

SEQ ID NO: 290 - protein, 9 aa, Artificial Sequence
  VL-CDR3_43
QQYSKLPRT

SEQ ID NO: 291 - protein, 9 aa, Artificial Sequence
  VL-CDR3_44
WQGTHFPQT

SEQ ID NO: 292 - protein, 9 aa, Artificial Sequence
  VL-CDR3_45
QQGQSSPFT

SEQ ID NO: 293 - protein, 9 aa, Artificial Sequence
  VL-CDR3_46
QQTNSWPLT

SEQ ID NO: 294 - protein, 9 aa, Artificial Sequence
  VL-CDR3_47
QHNRELPPT

SEQ ID NO: 295 - protein, 8 aa, Artificial Sequence
  VL-CDR3_48
WQGTHFPT

SEQ ID NO: 296 - protein, 9 aa, Artificial Sequence
  VL-CDR3_49
QQHYSSPWT

SEQ ID NO: 297 - protein, 116 aa, Artificial Sequence
  VH-1 Peptide Sequence
QVQLVQSGSELKKPGASVKVSCKASGYTFTNYGMNWVRQAPGQGLKWMGWINTNTGEPTYVEEFTGRFVFSLETSVSTAYLQISSLKAEDTAVYFCAPYDNFFAYWGQGTTVTVSS

SEQ ID NO: 298 - protein, 116 aa, Artificial Sequence
  VH-2 Peptide Sequence
QVQLVQSGAEVKKPGASVKVSCKASGYSFTNYYMHWVRQAPGQRLEWMGWIYPGSGNTNYNEKFQGRVTITADTSASTAYMELSSLRSEDTAVYYCSTAPGGFDVWGQGTTVTVSS

SEQ ID NO: 299 - protein, 122 aa, Artificial Sequence
  VH-3 Peptide Sequence
QVQLKQSGAELVRPGASVKLSCKASGYTFTDYYINWVKQRPGQGLEWIARIYPGTGNTDYNEKFKGRATLTAEKSSSTAYMQLSSLTSEDSAVYFCARFAYYYGSGGYFDYWGHGTTLTVSS

SEQ ID NO: 300 - protein, 119 aa, Artificial Sequence
  VH-4 Peptide Sequence
QIQLVQSGPELKKPGETVKISCKTSGYKFKTYVMSWVKQAPGKALKWMGWINTYSGVPTYADDFKGRFAFSLETSASTAYLEIINLKNEDTATYFCARDGNYGDPMDYWGQGTSVTVSS

SEQ ID NO: 301 - protein, 117 aa, Artificial Sequence
  VH-5 Peptide Sequence
QIQLVQSGPELKKPGETVKISCKASGYTFTTYGMGWVKQAPGKDLKWMGWINTYSGVPTYADDFKGRFAFSLETSASTAYLQISNLKNEDTATYFCSTPYEYDGAYWGQGTLVTVSA

SEQ ID NO: 302 - protein, 113 aa, Artificial Sequence
  VH-6 Peptide Sequence
EVQLVESGGGLVKPGGSLKLSCAASGFAFSSYAMSWVRQTPEKRLEWVATISDGGVYTYYTDHVKGRFTISRDNAEDNLYLQMSHLKSEDTAMYYCVRDGGYWGQGTTLTVSS

SEQ ID NO: 303 - protein, 116 aa, Artificial Sequence
  VH-7 Peptide Sequence
QIQLVQSGPELKKPGETVKISCKASGYTFTTYAMSWVKQAPGKGLKWMGWINTYSGVPTYADDLKGRFAFSLETSASTAYLQINNLKNEDTATYFCARGPYAMDYWGQGTSVTVSS

SEQ ID NO: 304 - protein, 115 aa, Artificial Sequence
  VH-8 Peptide Sequence
EVQLQQSGPELVKPGASVKISCKASGYTFTDFYINWVKQSHGKSLEWIGDINPKNGGINYNPKFKIKATLTVDKSSSTSYMDLRGLTSEDSAVYYCTSGYGFPYWGQGTLVTVSA

SEQ ID NO: 305 - protein, 116 aa, Artificial Sequence
  VH-9 Peptide Sequence
QIQLVQSGPELKKPGESVKISCKASGYAFTTYGMSWVQQAPGKGLKWMGWVNTYSGVPTCADDFKGRFAFSLETSASTAYLQINNLRNEDTATYFCARGPYAMDYWGQGTSVTVSS

SEQ ID NO: 306 - protein, 120 aa, Artificial Sequence
  VH-10 Peptide Sequence
QVQLQQSGPELVKPGASVKISCKASGYTFTDYYINWVKQRPGQGLEWIGWIYPGSNDTKYNEKFKGKATLTVDTSSSTAYMQLGSLTSEDSAVYFCANYFGCSGWFFDVWGTGTTVTVSS

SEQ ID NO: 307 - protein, 113 aa, Artificial Sequence
  VH-11 Peptide Sequence
EVQLVESGGGLVKPGGSLKLSCAASGFTFSSYAMSWVRQTPEKRLEWVATISDGGIYTYYPDNVKGRFTISRDNAKNNLFLQMSHLKSEDTAMYYCVRDGGYWGQGTTLTVSS

SEQ ID NO: 308 - protein, 116 aa, Artificial Sequence
  VH-12 Peptide Sequence
QIQLVQSGPELKKPGETVKISCKASGYTFTNYGMNWVKQAPGKGLKWMGWINTNTGEPTYVEEFKGRFAFSLETSASTAYLQINNLKNEDTATYFCAPYDNFFAYWGQGTLVTVSA

SEQ ID NO: 309 - protein, 116 aa, Artificial Sequence
  VH-13 Peptide Sequence
QVQLQQSGPELVKPGASVKISCKASGYSFTNYYIHWVKQRPGQGLEWIGWIYPGSGNTNYNEKFKGKATLTADTSSSTTNMQLSSLTSEDSAVYYCSTAPGGFDVWGSGTTVTVSS

SEQ ID NO: 310 - protein, 116 aa, Artificial Sequence
  VH-14 Peptide Sequence
QVQLVQSGAEVKKPGASVKVSCKASGYSFTNYYMHWVRQAPGQGLEWMGWIYPGSGNTNYNEKFQGRVTMTADTSISTAYMELSRLRSDDTAVYYCSTAPGGFDVWGQGTTVTVSS

SEQ ID NO: 311 - protein, 116 aa, Artificial Sequence
  VH-15 Peptide Sequence
QVQLVQSGAEVKKPGASVKVSCKASGYSFTNYYIHWVRQAPGQRLEWMGWIYPGSGNTNYNEKFQGRVTLTADTSASTTYMELSSLRSEDTAVYYCSTAPGGFDVWGQGTTVTVSS

SEQ ID NO: 312 - protein, 119 aa, Artificial Sequence
  VH-16 Peptide Sequence
QIQLVQSGPDLKKPGETVKISCKASGYTFTTYVMSWVKQAPGKDLKWMGWINTHSGVPTYADDFKGRFDFSLETSANTAFLQINNLKNEDTATYFCTRDGNDGDAMDNWGQGTSVTVSS

SEQ ID NO: 313 - protein, 120 aa, Artificial Sequence
  VH-17 Peptide Sequence
QVQLKQSGPGLVQPSQSLSITCTVSGFSLTSYGVHWVRQPPGKGLEWLGVIWSGGSTDYNAAFISRLSISKDNSKSQVFFKMNSLQADDTAIYYCAKGPYDYDLGWFAYWGQGTLVTVSA

SEQ ID NO: 314 - protein, 116 aa, Artificial Sequence
  VH-18 Peptide Sequence
QIQLVQSGPELKKPGETVKISCKASGYTFTTYGMSWVKQAPGKGLKWMAWINTYSGVPTYADDFKGRFAFSLETSASTAYLQINNLTNEDTATYFCARGPYAMDYWGQGTSVTVSS

SEQ ID NO: 315 - protein, 115 aa, Artificial Sequence
  VH-19 Peptide Sequence
QVQLQQPGAELVGPGSSVKLSCKASGYTFTNYWIHWVKQRPLQGLEWIGNIDPSDSETHYNQKFKDKATLTVDKSSSTAYMQLSSLTSEDSAVYYCARHGYYDYWGQGTTLTVSS

SEQ ID NO: 316 - protein, 119 aa, Artificial Sequence
  VH-20 Peptide Sequence
QVQLQQPGAELVKPGASVKLSCKASGYTFTSYWMHWVKQRPGQGLEWIGMIHPNSGSTDYNEKFKNKATLNVDKSSSTAYIQLSSLTSEDSAVYYCTRWGIYYYARDYWGQGTTLTVSS

SEQ ID NO: 317 - protein, 117 aa, Artificial Sequence
  VH-21 Peptide Sequence
QIQLVQSGPELKKPGETVKISCKASGYTFTTYGMSWVKQAPGKGLKWMGWINTYSGVPTYADDFKGRFAFSLETSASTAYLQINNLKNEDTATYFCAVPYEYDGAYWGQGTLVTVSA

SEQ ID NO: 318 - protein, 115 aa, Artificial Sequence
  VH-22 Peptide Sequence
EVQLQQSGPELVKPGASVKISCKASGYTFTDYYMNWVKQSHGKSLEWIGDINPNNGGTNYNQKFKGKATLTVDKSSSTAYMELRSLTSEDSAVYYCTSGYGFPYWGQGTLVTVSA

SEQ ID NO: 319 - protein, 117 aa, Artificial Sequence
  VH-23 Peptide Sequence
QIQLVQSGPELKKPGETVKISCKASGYTFTTYGMGWVKQAPGKGLKWMGWINTYSGVPTYADDFKGRFAFSLETSTSTAYLQINNLKNEDMATYFCATPYEYDGAYWGQGTLVTVSA

SEQ ID NO: 320 - protein, 112 aa, Artificial Sequence
  VH-24 Peptide Sequence
QVQLQQSGPELVKPGDSVKISCKAAGYTFSDYYINWVKQRPGQGLEWIGWIYPVSVNTKYNEKFKGKATLTVDTSSSTAYMQLSSLTSEDSGVYFCAYLDYWGQGTLVTVSA

SEQ ID NO: 321 - protein, 120 aa, Artificial Sequence
  VH-25 Peptide Sequence
QVQLKQSGPGLVQPSQSLSITCTVSGFSLTSYGVHWVRQAPGKGLEWLGVIWSGGSTDYNAAFMSRLSISKDNSKSQVFFKMNSLQADDTAIYYCAKSPDGYDVAWFGYWGQGTLVTVSA

SEQ ID NO: 322 - protein, 122 aa, Artificial Sequence
  VH-26 Peptide Sequence
QIQLVQSGPELKKPGETVKISCKASGYTFTNYGMNWVKQAPGKGLKWMGWINTYTGEPSYADDFKGRFAFSLETSASTAYLQINNLKNEDMATYFCARWGGYAGDYYAMDFWGQGTSVTVSS

SEQ ID NO: 323 - protein, 122 aa, Artificial Sequence
  VH-27 Peptide Sequence
QIQLVQSGPELKKPGETVKISCKASGYTFTNYGMNWVKQAPGKGLKWMGWINTYTGEPSYADDFKGRFAFSLETSASTAYLQINNLKNEDMATYFCARWGGYDGDYYAMDYWGQGTSVTVSS

SEQ ID NO: 324 - protein, 122 aa, Artificial Sequence
  VH-28 Peptide Sequence
QIQLVQSGPELKKPGETVKISCKASGYTFTNFGMNWVKQAPGKGLKWMGWINTYTGEPSYADDFKGRFAFSLETSASTAYLQINNLKNEDIATYFCARWGGYAGDYYAMDYWGQGTSVTVSS

SEQ ID NO: 325 - protein, 116 aa, Artificial Sequence
  VH-29 Peptide Sequence
EVQLLESGGGLVKPGGSLKLSCAASGFTFSSYAMSWVRQTPEKRLEWVASISSGGDTYYPDSVKGRFTISRDNARNILYLQMSSLRSEDTAMYYCASYGNSLFDYWGQGTTLTVSS

SEQ ID NO: 326 - protein, 114 aa, Artificial Sequence
  VH-30 Peptide Sequence
QIQLVQSGPELKKPGETVKISCKASGYTFTNYGMNWVKQAPGKGLKWMGWINTYTGEPTYAGDLKGRFAFSLETSASTAYLQINNLKNEDTATYFCVRYTMDYWGQGTSVTVSS

SEQ ID NO: 327 - protein, 124 aa, Artificial Sequence
  VH-31 Peptide Sequence
QVTLKESGPGILQPSQTLSLTCSFSGFSLSTSGMGVGWIRQPSGKGLEWLAHIWWDDDKYYNTALKSGLTISKDASKNQVFLKIASMDTADTATYYCARNLYDGSYGYYAMDYWGQGTSVTVSS

SEQ ID NO: 328 - protein, 122 aa, Artificial Sequence
  VH-32 Peptide Sequence
QIQLVQSGPELKKPGETVKISCKASGYTFTNYGMNWVKQAPGKGLKWMGWINTYTGEPAYADDFKGRFAFSLETSASTAYLQINNLKNEDMATYFCARWGGYDGDYYAMDYWGQGTSVTVSS

SEQ ID NO: 329 - protein, 123 aa, Artificial Sequence
  VH-33 Peptide Sequence
EVQLVESGGDLVKPGGSLKLSCAASGFTFSNYGLSWIRQTPDKRLEWVATISSGGSYTYYPDSVKGRFTISRDSAKNTLYLQMSSLKSEDTAMYYCARHAHYYGVSPYYFDYWGQGTCLTVSS

SEQ ID NO: 330 - protein, 119 aa, Artificial Sequence
  VH-34 Peptide Sequence
QIQLVQSGPEVKKPGETVKISCKASGYIFTNYGMNWVKQAPGKGLKWMGWINTYTGEPTYTDDFKGRFAFSLETSASTAYLQINNLKNEDTATYFCAKFGNYVGAMDYWGQGTSVTVSS

SEQ ID NO: 331 - protein, 120 aa, Artificial Sequence
  VH-35 Peptide Sequence
EVQLQQSGPELVKPGASVKISCKASGNTFTDHNMHWVKQSHGKSLEWIGYIYPYNGGTGYNQKFKSKATLTVDNSSSTVYMELRSLTSEDSAVYYCARGEYDYLAWFAYWGQGTLVTVSA

SEQ ID NO: 332 - protein, 119 aa, Artificial Sequence
  VH-36 Peptide Sequence
QIQLVQSGPELKKPGETVKISCKASGYTFTNYGMNWVKQAPGKGLKWMGWINTYTGEPTYVDDFKGRFAFSLETSASTAYLRINNLKNEDTATYFCAKFGNYVGAMDYWGQGTSVTVSS

SEQ ID NO: 333 - protein, 117 aa, Artificial Sequence
  VH-37 Peptide Sequence
EVQLVETGGGLVKPGGSLKLSCAASGFTFSSYAMSWVRQTPEKRLEWVASISSGGSTYYPDSVKGRFTISRDNARNILYLQMSSLRSEDTAMYYCTRFTTVVEMDYWGQGTSVTVSS

SEQ ID NO: 334 - protein, 112 aa, Artificial Sequence
  VH-38 Peptide Sequence
QVQLQQTGAELVKPGASVKLSCKASGYTFTSYWINWVKQRPGQGLEWIGNIYPGSSSIYYSEKFKSKATLTVDTSSSTAYMQLSSLTSDDSAVYYCARWGYWGQGTTLTVSS

SEQ ID NO: 335 - protein, 121 aa, Artificial Sequence
  VH-39 Peptide Sequence
QVTLKESGPGILQPSQTLSLTCSFSGFSLSTFGMGVGWIRQPSGKGLEWLAHIWWDDDKHYNPALKSRLTISKDTSKNQVFLRIANVDTADNATYYCARIDYGDYVGFAYWGQGTLVTVSA

SEQ ID NO: 336 - protein, 118 aa, Artificial Sequence
  VH-40 Peptide Sequence
QVQLQQSGPELVRPGALVKISCKASGYTFTSYDINWVKQRPGQGLEWIGWIYPGDGSTKYNEKFKGKATLTADKSSSTAYMQLSSLTSENSAVYFCAREAASNAMDYWGQGTSVTVSS

SEQ ID NO: 337 - protein, 122 aa, Artificial Sequence
  VH-41 Peptide Sequence
EVKLEESGGGLVQPGGSMKLSCVASGFTFSNYWMNWVRQSPEKGLEWVAEIRLKSNNYATHYAESVKGRFTISRDDSKSSVYLQMNNLRAEDTGIYYCTRHYGFPYWYFDVWGAGTTVTVSS

SEQ ID NO: 338 - protein, 118 aa, Artificial Sequence
  VH-42 Peptide Sequence
QIQLVQSGPELKKPGETVKISCKASGYTFTNYGMNWVKQAPGKGLKWMGWINTNTGEPTYAEEFKGRFAFSLETSASTAYLQINNLKNEDTATYFCATGGGNWDFDYWGQGTTLTVSS

SEQ ID NO: 339 - protein, 114 aa, Artificial Sequence
  VH-43 Peptide Sequence
QIQLVQSGPELTKPGETVKISCKASGYTFTDYGMNWVRQAPGETLKWMGWINTYTGEPTYADDFKGRFAFSLESSASTAYLQINNLKNEDVATYFCARYPMDYWGQGTSVTVSS

SEQ ID NO: 340 - protein, 122 aa, Artificial Sequence
  VH-44 Peptide Sequence
EVKLEESGGGLVQPGGSMKLSCVASGFTFSNYWMNWVRQSPEKGLEWVAELRLKSNNYATHYAESVKGRFTISRDDSKSSVYLQMNNLRAEDTGIYYCTRHYGFPYWYFDVWGAGTTVTVSS

SEQ ID NO: 341 - protein, 118 aa, Artificial Sequence
  VH-45 Peptide Sequence
EVQLQQSGPELVKPGASVKMSCKASGYTFTSYVMHWVKQKPGQGLEWIGYINPYNDGTKYNEKFKGKATLTSDKSSSTAYMELSSLTSEDSAVYYCARLLFYYAMDYWGQGTSVTVSS

SEQ ID NO: 342 - protein, 118 aa, Artificial Sequence
  VH-46 Peptide Sequence
QVQLQQSGPELVRPGALVKISCKASGYTFTSYDINWVKQRPGQGLEWIGWIYPGDGSTKYNEKFKGKATLTADKSSSTVYMQLSSLTSENSAVYFCAREAASNAMDYWGQGTSVTVSS

SEQ ID NO: 343 - protein, 118 aa, Artificial Sequence
  VH-47 Peptide Sequence
QVQLQQSGPELVKPGALVKISCKASGYTFTSYDINWVKQRPGQGLEWIGWIYPGDGSTKYNEKFKGKAALTADKSSSTAYMQLSSLTSENSAVYFCAREAASNAMDYWGQGTSVTVSS

SEQ ID NO: 344 - protein, 118 aa, Artificial Sequence
  VH-48 Peptide Sequence
EVQLQQSGPELVKPGASVKMSCKASGYSFTNYIMHWVKQKPGQGLEWIGYINPYNDGTKYNEKFKGKATLTSDKSSSTAYMELSSLTSEDSAVYYCARLLFYYAMDYWGQGTSVTVSS

SEQ ID NO: 345 - protein, 118 aa, Artificial Sequence
  VH-49 Peptide Sequence
QVQLQQSGAELVKPGASVKLSCKASGYTFRSYDINWVRQRPEQGLEWIGWIFPGEGISKYNEKFKGKATLTTDKLSSTAYMQLSSLTSEDSAVYFCAREATAGAMDYWGQGTSVTVSS

SEQ ID NO: 346 - protein, 122 aa, Artificial Sequence
  VH-50 Peptide Sequence
EVKLLESGGGLVQPGGSMKLSCVASGFTFSNFWMNWVRQSPEKGLEWVAEIRLKSNNYATHYAESVKGRFTISRDDSKSSVYLQMNNLRAEDTGIYYCTRHYGFPYWYFDVWGAGTTVTVSS

SEQ ID NO: 347 - protein, 118 aa, Artificial Sequence
  VH-51 Peptide Sequence
QIQLQQSGAELVKPGASVKLSCKASGYTFTSYDICWVRQRPEQGLEWIGWIFPGDGTTKYTENFKGKATLTTDKSSSTAYMHLSRLTSEDSAVYFCAREGAGSWFAYWGQGTLVTVSA

SEQ ID NO: 348 - protein, 114 aa, Artificial Sequence
  VH-52 Peptide Sequence
EVQLQQSGAELVRPGTSVKVSCKASEYAFNNYMMEWVKQRPGQGLEWIGVINPGSGATNYNENFKDKATLTADKSSTTAYMQLSSLTSDDSAVYFCTYNDLGYWGQGTLVTVSA

SEQ ID NO: 349 - protein, 123 aa, Artificial Sequence
  VH-53 Peptide Sequence
EVKLQQSGPELMKPGTSMKISCKASGYSFTGYTMNWVKQSHGKNLEWIGLINPYNGGTNYNQKFRGKATLSVDKSSNTAYMELLSLTSEDSAVYYCARKDDYYGSSPYALDYWGQGTSVTVSS

SEQ ID NO: 350 - protein, 116 aa, Artificial Sequence
  VH-54 Peptide Sequence
QVQLQQSGAELMKPGASVKISCKATGYTFTNYWIEWVKQRPGHGLEWIGEFLPGDGSSHYNEKFKGKATFTSDTSSNTAYIHLTSLTSEDSAVYYCVRDDYDSDYWAQGTTLTVSS

SEQ ID NO: 351 - protein, 120 aa, Artificial Sequence
  VH-55 Peptide Sequence
QVQMKQSGPGLVQPSQSLSITCTVSGFSLINYGVHWVRQSPGKGLEWLGVIWSGGSTDYNAAFISRLSISKDNSKSQVFFKMNSLQADDTAIYYCARIYYYGRGYAMDYWGQGTSVTVSS

SEQ ID NO: 352 - protein, 122 aa, Artificial Sequence
  VH-56 Peptide Sequence
EVQLQQSGAEVVKPGAPVKLSCKASGYTFNNYWLNWVKQRPGRGLEWIGRIDPSDSETHYNQKFKDKATLTVDMSSSTAYIQLSSLTSEDSAVYYCARGDYYYGTRGPMDYWGQGTSVTVSS

SEQ ID NO: 353 - protein, 115 aa, Artificial Sequence
  VH-57 Peptide Sequence
QVQLQQSGAELVRPGASVNLSCKASGYTFTNYWMNWVKQRPGQGLEWVGMIDPSDSETHYNQMFKDKATLTIDKSSSIAYMQLSSLTSEDSAVYYCARWGAMDYWGQGTSVTVSS

SEQ ID NO: 354 - protein, 121 aa, Artificial Sequence
  VH-58 Peptide Sequence
QVQLKQSGPGLVAPSQSLSITCTVSGFSLTSYGVHWVRQPPGKGLEWLGIIWAGGSTNYNPALMSRLSISKDKSKSQVFLKMNSLKTDDTAMYYCARDRASLLRPGAMDYWGQGTSVTVSS

SEQ ID NO: 355 - protein, 118 aa, Artificial Sequence
  VH-59 Peptide Sequence
QIQLVQSGPELKKPGETVKISCKASGYTFTNYGMNWVKQAPGKGLKWMGWINTNTGEPTYAEEFKGRFAFSLETSASTAYLQINYLKNEDTATFFCARLDYDYDEDYWGQGTTLTVSS

SEQ ID NO: 356 - protein, 120 aa, Artificial Sequence
  VH-60 Peptide Sequence
QVQLVETGPGLVAPSQSLSITCTVSGFSLTSYGVHWIRQSPGKGLEWLGTIWAGGSTDYNSPLMSRLSISKDNSKNQVFLKMNSLQIDDTAIYYCASPPSGYDYDVFASWGQGTLVTVSA

SEQ ID NO: 357 - protein, 120 aa, Artificial Sequence
  VH-61 Peptide Sequence
QVQLKQSGPGLVQPSQSLSITCTVSGFSLINYGVHWVRQSPGKGLEWLGVIWSGGSTDYNAAFISRLSISKDNSKSQVFFKMNSLQADDTAIYYCARIYYYGRGYAMDYWGQGTSVTVSS

SEQ ID NO: 358 - protein, 120 aa, Artificial Sequence
  VH-62 Peptide Sequence
QVQLKESGPGLVAPSQSLSITCTVSGFSLTSYGVHWIRQPPGKGLEWLGGIWAGGSTDYNSPLMSRLSITKDNSKSQVFLKMNSLQSDDTAMYYCASPPSGYDYDVFAYWGQGTLVTVSA

SEQ ID NO: 359 - protein, 120 aa, Artificial Sequence
  VH-63 Peptide Sequence
QVQLKESGPVLVAPSQSLSITCTVSGFSLSSYGVHWVRQPPGKGLEWLGVIWAGGSTDYDSALMSRLSISKDNSKSQVFLKMDSLQTDDTAMYYCAKPPYDYDGAWFAYWGQGTLVTVSA

SEQ ID NO: 360 - protein, 114 aa, Artificial Sequence
  VH-64 Peptide Sequence
QVQLQQSGPQLVRPGASVKISCKASGYSFTNYWMHWVKQRPGQGLEWIGMIDPSDSETRLNQKFKDKATLTVDKSSSTAYMQLSSPTSEDSAVYYCATGRPDYWGQGTTLTVSS

SEQ ID NO: 361 - protein, 114 aa, Artificial Sequence
  VH-65 Peptide Sequence
QVQLQQSGPQLVRPGASVKISCKASGYSFTSYWMHWVKQRPGQGLEWIGMIDPSDSETRLNQKFKDKATLTVDKSSSTAYMQLSSPTSEDSIVYYCAKGRPDYWGQGTTLTVSS

SEQ ID NO: 362 - protein, 118 aa, Artificial Sequence
  VH-66 Peptide Sequence
DGKLQESGPGLVKPSQSLSLTCSVTGYSITSGYYWNWIRQFPGNKLEWMGHISYDGRNNYNPSLKNRISITRDTSKNQFFLKLNSVTTEDTATYYCAGYDFLWYFDVWGTGTTVTVSS

SEQ ID NO: 363 - protein, 121 aa, Artificial Sequence
  VH-67 Peptide Sequence
QVQLKESGPGILQPSQTLSLTCSFSGFSLSTFGMGVGWIRQPSGKGLEWLAHIWWDDDKHYNPALKSRLTISKDTSKNQVFLRIANVDTADNATYYCARIDYGDYVGFAYWGQGTLVTVSA

SEQ ID NO: 364 - protein, 118 aa, Artificial Sequence
  VH-68 Peptide Sequence
DGQLQESGPGLVKPSQSLSLTCSVTGYSITSGYYWNWIRQFPGNKLEWMGHISYDGRNNYNPSLKNRISITRDTSKNQFFLKLNSVTTEDTATYYCAGYDFLWYFDVWGTGTTVTVSS

SEQ ID NO: 365 - protein, 119 aa, Artificial Sequence
  VH-69 Peptide Sequence
EVQLQQSGAELVKSGASVKLSCTASGFNIKDYYMHWVKQRTEQGLEWIGRIYPEDDETKYAPKFQGKATITADTSSNTAYLQLSSLTSEDTAVYYCARSGGYYVWFAYWGQGTLVTVSA

SEQ ID NO: 366 - protein, 121 aa, Artificial Sequence
  VH-70 Peptide Sequence
EVQLQQSGPELVKPGSSVKISCKASRYTFTDYNMDWVKQSHGKRLEWIGYIYPNNGGTGYNQKFKGKATLTVDKSSSTAYMELRSLTSEDSAVYYCARSYYDGSYDAMDYWGQGTSVTVSS

SEQ ID NO: 367 - protein, 114 aa, Artificial Sequence
  VH-71 Peptide Sequence
QIQLVQSGPELKKPGETVKISCKASGYTFTIFGMNWVKQAPGKGLKWMGWVNTYTGEPTYADDFKGRFAFSLETSASTAYLQINNLKNEDTATYFCARGWFAYWGQGTLVTVSA

SEQ ID NO: 368 - protein, 120 aa, Artificial Sequence
  VH-72 Peptide Sequence
QVQLKESGPVLVAPSQSLSITCTVSGFSLTSYGIHWVRQPPGKGLEWLGVIWAGGSTNYNSALMSRLSISKDNSKSQVFLKMNSLQIDDTAMYYCAKPPHDYDQAWFAYWGQGTLITVSA

SEQ ID NO: 369 - protein, 116 aa, Artificial Sequence
  VH-73 Peptide Sequence
QVQLQQSGAELVRPGASVKLSCKASGYTFTSSWMNWVKQRPGQGLDWIGMIDPSDSETHYNQMFKDKATLTVDKSSNTAYMQLSRLTSEDSAVYYCVNSNYESGYWGQGTTLTVSS

SEQ ID NO: 370 - protein, 116 aa, Artificial Sequence
  VH-74 Peptide Sequence
QVQLQQSGAELVRPGASVKLSCKASGYTFTGYWLNWVKQRPGQGLEWIGMIDPSDSETHYNQVFKDKATMTVDRSSSTAYMQLSGLTSEDSAVYYCANSNYASGSWGQGTTLTVSS

SEQ ID NO: 371 - protein, 120 aa, Artificial Sequence
  VH-75 Peptide Sequence
EVQLQQSGPELVKPGASVKVSCKASGYSFTDYNMYWVMQSHGKSLEWIGYIDPYNDATSYSQKFTGKATLTVDKSSSTAFMHLNSLTSEDSAVYYCARWGRYEYYAMDYWGQGTSVTVSS

SEQ ID NO: 372 - protein, 115 aa, Artificial Sequence
  VH-76 Peptide Sequence
QVQLKESGPDLVQPSQTLSLTCTVSGFSLTIYGVHWVRQPPGKGLEWVGTVAWDDKKYYNSPLQSRLSISRDTSKNQVFLKLSSLQTEDTAMYYCTMTGGPINYWGPGTSVTVSS

SEQ ID NO: 373 - protein, 117 aa, Artificial Sequence
  VH-77 Peptide Sequence
EVQLVESGGGLVKPGGSLKLSCAASGFTFSSYAMSWVRQTPEKRLEWVASISSGDSPYYPDSVKGRFTISRDNARNILYLQMSSLRSEDTAMYYCTRFTTVVEMDYWGQGTSVTVSS

SEQ ID NO: 374 - protein, 112 aa, Artificial Sequence
  VL-1 Peptide Sequence
DIVLTQSPLSLPVTPGEPASISCRSSKSLLYKDGKTYLNWFLQKPGQSPQLLIYLMSTHASGVPDRFSGSGSGTDFTLKISRVEAEDVGVYYCQQLVDYPLTFGGGTKLEIK

SEQ ID NO: 375 - protein, 112 aa, Artificial Sequence
  VL-2 Peptide Sequence
DIVMTQTPLSLSVTPGQPASISCKSSKSLLHSDGITYLYWYLQKPGQSPQLLIYRMSNLASGVPDRFSGSGSGTDFTLKISRVEAEDVGVYYCAQMLEFPLTFGQGTKLEIK

SEQ ID NO: 376 - protein, 107 aa, Artificial Sequence
  VL-3 Peptide Sequence
DILMTQSPSSMSVSLGDTVSITCHASQGINSNMGWLQQKPGKSFKGLIYHATNLEDGVPSRFSGSGSGADYSLTISSLESEDFADYYCVQYAQFPPTFGSGTKLEIK

SEQ ID NO: 377 - protein, 112 aa, Artificial Sequence
  VL-4 Peptide Sequence
DVVMTQTPLTLSVAIGQPASISCKSSQSLLYTNGKTYLNWLLQRPGQSPKRLIYLLSKLDSGVPDRFSASGSGTDFTLKISRVEAEDLGVYYCLQSTHFPLTFGAGTKLEMK

SEQ ID NO: 378 - protein, 112 aa, Artificial Sequence
  VL-5 Peptide Sequence
DVVMTQTPLTLSVTIGQPASISCKSSQSLFDSDGKTYLNWLLQRPGQSPKRLIYLVSKLDSGVPDRFTGSGSGTDFTLKISRVEAEDLGVYYCWQGTHFPLTFGAGTKLEMK

SEQ ID NO: 379 - protein, 112 aa, Artificial Sequence
  VL-6 Peptide Sequence
DVLMTQTPLSLPVSLGDQASISCRSSQSIVHNNGNTYLEWYLQKPGQSPKLLIYKVSNRFSGVPDRFSGSGSGTDFTLKISRVEAEDLGVYYCFQGSHVPLTFGGGTKLELK

SEQ ID NO: 380 - protein, 107 aa, Artificial Sequence
  VL-7 Peptide Sequence
DIQMTQTTSSLSASLGDRVTISCSASQGINNYLNWYQQKPDGTVKLLIYYASSLHSGVPSRFSGSGSGTDYSLTISNLEPEDIATYYCQQYSQVPYTFGSGTKLEIK

SEQ ID NO: 381 - protein, 107 aa, Artificial Sequence
  VL-8 Peptide Sequence
DIQMNQSPSSLSASLGDTITITCRASQNIYIWLSWYQQKPGNIPKLLIYKASNLHTGVPSRFSGSGSGTDFTLTISTLQPEDIATYFCLQGQSYPLTFGAGTKLEMK

SEQ ID NO: 382 - protein, 107 aa, Artificial Sequence
  VL-9 Peptide Sequence
DIQMTQTTSSLSASLGDRVTINCSASQDISNYLNWYQQKPDGTVKLLIYYTSSLLSGVPSRFSGSGSGTDYSLTISNLEPEDIATYFCQQYSKLPYTFGSGTHLEIK

SEQ ID NO: 383 - protein, 112 aa, Artificial Sequence
  VL-10 Peptide Sequence
DIVMTQAAFSNPVTLGTSASISCRSSKSLLHSDGITYLYWYLQRPGQSPQLLIYRMSNLASGVPDRFSGSGSGTDFTLRISRVEAEDVGVYYCAQMIEFPLTFGAGTILELK

SEQ ID NO: 384 - protein, 112 aa, Artificial Sequence
  VL-11 Peptide Sequence
DVVMTQTPLTLSVAIGQPASISCKSSQSLLYTNGKTYLNWLLQRPGQSPKRLIYLVSKLDSGVPDRFSGSGSGTDFTLKISRVEAEDLGVYYCLQSTHFPLTFGAGTKLELK

SEQ ID NO: 385 - protein, 112 aa, Artificial Sequence
  VL-12 Peptide Sequence
DVLMTQTPLSLPVSLGDQASISCRSSQSIVHSNGNTYLEWYLQKPGQSPKLLIYKVSNRFSGVPDRFSGSGSGTDFTLKISRVEAEDLGVYYCFQGSHVPLTFGAGTKLELK

SEQ ID NO: 386 - protein, 112 aa, Artificial Sequence
  VL-13 Peptide Sequence
DIVITQDELSNPVTSGESVSISCRSSKSLLYKDGKTYLNWFLQRPGQSPQLLIYLMSTHASGVSDRFSGSGSGTDFTLEISRVKAEDVGVYYCQQLVDYPLTFGAGTKLELK

SEQ ID NO: 387 - protein, 112 aa, Artificial Sequence
  VL-14 Peptide Sequence
DIVMTQAAFSNPVTLGTSASISCRSSKSLLHSDGITYLYWYLQRPGQSPQLLIYRMSNLASGVPDRFSGSGSGTDFTLRISRVEAEDVGVYYCAQMLEFPLTFGAGTKLELK

SEQ ID NO: 388 - protein, 112 aa, Artificial Sequence
  VL-15 Peptide Sequence
DIVMTQSPLSLPVTPGEPASISCRSSKSLLHSDGITYLYWYLQKPGQSPQLLIYRMSNLASGVPDRFSGSGSGTDFTLKISRVEAEDVGVYYCAQMLEFPLTFGQGTKLEIK

SEQ ID NO: 389 - protein, 113 aa, Artificial Sequence
  VL-16 Peptide Sequence
DVVMTQTPLTLSVTIGQPASISCKSSQSLLYTDGKTYLSWFLQRPGQSPKRLIYLVSKLDSGVPDRFSGSGSGTDFTLKISRVEAEDLGVYYCLQSTHFPLTFGAGTKLEVKR

SEQ ID NO: 390 - protein, 108 aa, Artificial Sequence
  VL-17 Peptide Sequence
SIVMTQTPKFLLVSAGDRVTITCKASQSVSNDVAWYQQKPGQSPKLLIYYASNRYTGVPDRFTGSGYGTDFTFTISTVQAEDLAVYFCQQDYTSPYTFGGGTKLEIKR

SEQ ID NO: 391 - protein, 108 aa, Artificial Sequence
  VL-18 Peptide Sequence
DIQMTQTTSSLSASLGDRVTISCSASQGISNYLNWYQQKPDGTVKLLIYYTSSLHSGVPSRFSGSGSGTDYSLTISNLEPEDIATYYCQQYSELPYTFGSGTKLEIKR

SEQ ID NO: 392 - protein, 108 aa, Artificial Sequence
  VL-19 Peptide Sequence
DIVMTQSHKFMSTSVGDRVSITCKASQDVSTAVAWYQQKPGQSPKLLIYWASTRHTGVPDRFTGSGSGTDYTLTISSVQAEDLALYYCQQHYTTPLTFGAGTKLELKR

SEQ ID NO: 393 - protein, 108 aa, Artificial Sequence
  VL-20 Peptide Sequence
DIVMTQSQKFMSTSVGERVSITCKASQNVGTNVAWYQQKAGQSLELLIYGASNRHTGVPDRFTGSGSGTDFTLTITNVQSEDMTNYFCEQYSNFPLTFGAGTKLELKR

SEQ ID NO: 394 - protein, 113 aa, Artificial Sequence
  VL-21 Peptide Sequence
DVVMTQTPLTLSVTIGQPASISCKSSQSLFHSDGKTYLNWLLQRPGQSPKRLIYLVSKLDSGVPDRFTGSGSGTDFTPKISRVEDEDLGVYYCWQGTHFPLTFGAGTKLEMKR

SEQ ID NO: 395 - protein, 108 aa, Artificial Sequence
  VL-22 Peptide Sequence
DIQMNQSPSSLSASLGDTISITCRASQNINIWLSWYQQKPGNIPQLLIYKASNLHTGVPSRFSGSGSGTDFTLTISSLQPEDIATYYCLQGQSYPLTFGAGTKLVMKR

SEQ ID NO: 396 - protein, 111 aa, Artificial Sequence
  VL-23 Peptide Sequence
DVVMTQTPLTLSVTIGQPASISCKSSQSLLHSDGKTYLNWLLQRPGQPPKRLMYLVSTLDSGVPDRFTGSGSGTDFTLKISRVEAEDLGVYYCWQGTHFPLTFGAGTKPER

SEQ ID NO: 397 - protein, 111 aa, Artificial Sequence
  VL-24 Peptide Sequence
DIVMTQAAFSNPVTLGTSASISCRSSKSLLHSDGITYFYWYLQRPGQSPQLLIYRMSNLASGVPDRFSGSGSGTDFTLRISRVEAEDVGVYYCAQMLEFPLTFGAGTKLER

SEQ ID NO: 398 - protein, 108 aa, Artificial Sequence
  VL-25 Peptide Sequence
DIVMTQSHKFMSTSVGDRVSITCKASQDVRTAVAWYQQKPGQSPKLLIYWASTRHTGVPDRFTGSGSGTDFTLTLSNVQSEDLADYFCQQYSSYPWTFGGGTKLEIKR

SEQ ID NO: 399 - protein, 112 aa, Artificial Sequence
  VL-26 Peptide Sequence
NIWLTQSPSSLAVSAGEMVTMTCKSSQSVLYSSNQKNYLAWYQQKPGQSPKLLIYWASTRESGVPDRFTGSGSGTDFSLTISSVQAEDLAVYYCHQYLSSLTFGAGTKLELK

SEQ ID NO: 400 - protein, 112 aa, Artificial Sequence
  VL-27 Peptide Sequence
NIMMTQSPSSLAVSAGEKVTMSCKSSQSVLYSSNQKNYLAWYQQKPGQSPKLLIYWASTRESGVPDRFTGSGSGTDFTLTISSVQPEDLAVYYCHQYLSSLTFGAGTKLELK

SEQ ID NO: 401 - protein, 112 aa, Artificial Sequence
  VL-28 Peptide Sequence
NIMMTQSPSSLAVSAGQKVTMSCKSSQSVLYSSSQKNYLAWYQQKPGQSPKLLIYWASTRESGVPDRFSGSGSGTDFTLTISSVQPEDLAVYYCHQYLSSLTFGAGTKLELK

SEQ ID NO: 402 - protein, 112 aa, Artificial Sequence
  VL-29 Peptide Sequence
DVVMTQTPLSLPVSLGDQASISCRSSQSLVHNSGNTYLHWYLQRPGQSPNLLIYKVSNRFSGVPDRFSGSGSGTDFTLKISRVAAEDLGVYFCSQSTHVPPTFGGGTKLEIK

SEQ ID NO: 403 - protein, 109 aa, Artificial Sequence
  VL-30 Peptide Sequence
QAVVTQESALTTSPGETVTLTCRSSTGAVTTSNYANWVQEKPDHLFTGLIGGINNRVPGVPARFSGSLIGDKAALTITGAQTEDEAIYFCALWYSNHWVFGGGTKLTVL

SEQ ID NO: 404 - protein, 112 aa, Artificial Sequence
  VL-31 Peptide Sequence
DIVMTQAAFSNPVTLGTSASISCRSSKSLLHTNGITFLYWYLQKPGQSPQPLIYQMSNLASGVPDRFSSSGSGTDFTLRISRVEAEDVGVYYCAQNLELPWTFGGGTKLEIN

SEQ ID NO: 405 - protein, 112 aa, Artificial Sequence
  VL-32 Peptide Sequence
NIMMTQSPSSLAVSAGEKVTMSCKSSQSVLYSSNQKNYLAWYQQKPGQSPKLLIYWASTRESGVPDRFTGSGSGTDFTLTISSVQAEDLAVYYCHQYLSSLTFGAGTKLELK

SEQ ID NO: 406 - protein, 113 aa, Artificial Sequence
  VL-33 Peptide Sequence
DIVMTQSPSSLAMSVGQKVTMSCKSSQSLLNSSNQKNYLAWYQQKPGQSPKLLVYFASTRESGVPDRFIGSGSGTDFTLTISSVQAEDLADYFCQQHYSTPYTFGGGAKLEIK

SEQ ID NO: 407 - protein, 107 aa, Artificial Sequence
  VL-34 Peptide Sequence
DIRMTQSPSSLSASLGDTITITCHASQNINVWLSWYQQKPGNIPKLLIYKASNLHTGVPSRFSGSGSGTGFTLTISSLQPEDIATYYCQQGQSYPYTFGGGTKLELK

SEQ ID NO: 408 - protein, 107 aa, Artificial Sequence
  VL-35 Peptide Sequence
EIVLTQSPASLSVTTGEKVTIRCITSIDIDDDMNWYQQKPGEPPKLLISEGNTLRPGVPSRFSSSGYGTDFVFTIENTLSEDVADYYCLQSDNKPLTFGAGTKLELK

SEQ ID NO: 409 - protein, 107 aa, Artificial Sequence
  VL-36 Peptide Sequence
DIQVIQSPSSLSASLGDTITITCHASQNINVWLSWYQQKPGNIPKLLIYKASNLHTGVPSRFSGSGSGTGFTLTISSLQPEDIATYYCQQGQSYPYTFGGGTKLELK

SEQ ID NO: 410 - protein, 107 aa, Artificial Sequence
  VL-37 Peptide Sequence
EIKMNQSPSSLSASLGDTITITCHASQNINVWLSWYQQKPGNIPKLLIYKASNLHTGVPSRFSGSGSGTGFTLTISSLQPEDIATYYCQQGQSYPYTFGGGTKLELK

SEQ ID NO: 411 - protein, 109 aa, Artificial Sequence
  VL-38 Peptide Sequence
QAVVTQESALTTSPGETVTLTCRSSTGAVTTSNYANWVQEKPDHLFTGLIGGTNNRAPGVPARFSGSLIGDKAALTITGAQTEDEAIYFCALWYSNHLVFGGGTKLTVL

SEQ ID NO: 412 - protein, 112 aa, Artificial Sequence
  VL-39 Peptide Sequence
DVLMTQTPLSLPVSLGDQASISCRSSQDIVHSSGNTYLEWYLQKPGQSLKLLIYKVSNRFSGVPDRFSASGSGTDFTLKISRVEAEDLGVYYCFQGSHVPPTFGSGTKLEIK

SEQ ID NO: 413 - protein, 112 aa, Artificial Sequence
  VL-40 Peptide Sequence
DIGMRQAAFSNPVTLGTSASISCRSSKSLLYSNGITYLYWFLQKPGQSPQLLIYQMSNLASGVPDRFSSSGSGTDFTLRISRVEADDVGVYYCAQNLELPWTFGGGTKLEIK

SEQ ID NO: 414 - protein, 111 aa, Artificial Sequence
  VL-41 Peptide Sequence
DIVLTQSPASLGVSLGQRATISCRASKSVSTSGYSYMHWYQQKPGQPPKLLIYLASILESGVPARFSGSGSGTDFTLNIHPVEEEDAAIYYCQHSRELPLTFGAGTKLELK

SEQ ID NO: 415 - protein, 111 aa, Artificial Sequence
  VL-42 Peptide Sequence
NIVLTQSPASLAVSLGQRATISCRASESVDSYGNSFMHWYQQKPGQPPKLLIYLASNLESGVPARFSGSGSRTDFTLTIDPVEADDAATYYCQQNNEDPWTFGGGTKLEIK

SEQ ID NO: 416 - protein, 112 aa, Artificial Sequence
  VL-43 Peptide Sequence
DVVMTQTPLTLSVTIGQPASISCKSSQSLLYSNGKTYLNWLLQRPGQSPKRLIYLVSKLDSGVPDRFTGSGSGTDFTLKISRVEAEDLGVYYCVQGTHFPQTFGGGTKLEIK

SEQ ID NO: 417 - protein, 107 aa, Artificial Sequence
  VL-44 Peptide Sequence
DILMTQSPSSMSVSLGDTVSITCHASQGINSNIGWLQQKPGKSFKGLIYHGTNLEDGVPSRFSGSGSGADYSLTISSLESEDFADYYCVQYDQFPWTFGGGTKLEIK

SEQ ID NO: 418 - protein, 111 aa, Artificial Sequence
  VL-45 Peptide Sequence
DIVMSQSPASLGVSLGQRATISCRASKSVSTSGYSYMHWYQQKPGQPPKLLIYLASILESGVPARFSGSGSGTDFTLNIHPVEEEDAAIYYCQHSRELPLTFGAGTKLELK

SEQ ID NO: 419 - protein, 111 aa, Artificial Sequence
  VL-46 Peptide Sequence
DIVLTQSPASLAVSLGQRATISCRASKSVSTSGYSYMHWYQQKPGQPPKLLIYLASILESGVPARFSGSGSGTDFTLNIHPVEEEDAATYYCQHSRELPLTFGAGTKLELK

SEQ ID NO: 420 - protein, 107 aa, Artificial Sequence
  VL-47 Peptide Sequence
DILMTQTPSSMSVSLGDTVSITCHASQGISSNIGWLQQKPRKSFKGLIYYGTNLEDGVPSRFSGSGSGADYSLTISSLESEDFADYYCVQYDQFPWTFGGGTKLEIK

SEQ ID NO: 421 - protein, 111 aa, Artificial Sequence
  VL-48 Peptide Sequence
DIVLTQSPASLAVSLGQRATISCRASKSVSTSGYSCMHWYQQKPGQPPKLLIYLASNLESGVPARFSGGGSGTDFTLSIHPVEEEDAATYYCHHSTELPYTFGGGTKLEVE

SEQ ID NO: 422 - protein, 111 aa, Artificial Sequence
  VL-49 Peptide Sequence
DIVLTQSPASLAVSLGQRATISCRASESVDSYGNSFMHWYQQKPGQPPKLLIYLASNLESGVPARFSGSGSRTDFTLTIDPVEADDAATYYCQQNNEDPWTFGGGTKLEIK

SEQ ID NO: 423 - protein, 111 aa, Artificial Sequence
  VL-50 Peptide Sequence
DVVMTQTPLTLSVTIGQPASISCKSSQSLLYSDGKTYLNWLLQRPGQSPKRLIYLVSQLDSGVPDRFTGSGSGTDFTLKISRVEADDLGVYCCVQGTHLPTFGGGTKLEIK

SEQ ID NO: 424 - protein, 111 aa, Artificial Sequence
  VL-51 Peptide Sequence
DIVMTQSPASLAVSLGQRATISCRASESVENHVNSFMHWFQQKPGQPPKLLIYRASNLQSGIPARFSGSGSRTDFTLTINPVEADDVATYYCQQNNEVPYTFGGGTKLEIK

SEQ ID NO: 425 - protein, 106 aa, Artificial Sequence
  VL-52 Peptide Sequence
QIVLSQSPAILSASPGEKVTMTCRASSSVTYMYWYQQKPGSSPQPWIYATSNLASGVPARFSGSGSGTSYSLTISRVEAEDAATYYCQQWSSNPLTFGAGTKLELK

SEQ ID NO: 426 - protein, 111 aa, Artificial Sequence
  VL-53 Peptide Sequence
DIVLTQSPASLAVSLGQRATISCRASESLDNSGISFMNWFQQRPGQPPKLLIYAASNLESGVPARFSGSGSGTDFSLNIHPMEEDDAAMYFCQHSKEVPWTFGGGTKLEIK

SEQ ID NO: 427 - protein, 107 aa, Artificial Sequence
  VL-54 Peptide Sequence
DIVMTQSHKIMSTSVGDRVSITCKASQDVSTTVAWFQQKPGQSPKLLLYWASTRHTGVPDRFTGSGSGTDYTLTISSVQAEDLALYYCQQHYSPPFTFGSGTKLEIK

SEQ ID NO: 428 - protein, 107 aa, Artificial Sequence
  VL-55 Peptide Sequence
DIVMTQSQKFMSTSVGDRVSVTCKASQNVGINVAWYQQKPGQSPKALIYSASYRYSGVPDRFTGSGSGTDFTLTISNVQSEDLAEYFCQQYNSYPYTFGGGTKLEMK

SEQ ID NO: 429 - protein, 112 aa, Artificial Sequence
  VL-56 Peptide Sequence
DVVMTQTPLTLSVTLGQPASISCRSSQSLLDSDGKTYLNWLLQRPGQSPKRLIYLVSRLDSGVPDRFTGSGSGTDFTLKISRVEAEDLGVYYCWQGTHFPFTFGGGTKLEIK

SEQ ID NO: 430 - protein, 107 aa, Artificial Sequence
  VL-57 Peptide Sequence
DIRMTQSPASLSASVGETVTITCRASGNIHNYLAWYHQKQGKSPQLLVYNVKTLADGVPSRFSGSGSGTQFSLKINSLQPEDFGTYYCQHFWSIFPTFGGGTKLEIK

SEQ ID NO: 431 - protein, 106 aa, Artificial Sequence
  VL-58 Peptide Sequence
QILLSQSPAILSASPGEKVTMTCRASSSVTYMYWYQQKPGSSPQPWIYATSNLASGVPARFSGSGSGTSYSLTISRVEAEDAATYYCQQWSSNPLTFGAGTKLELK

SEQ ID NO: 432 - protein, 107 aa, Artificial Sequence
  VL-59 Peptide Sequence
DILMTQSPASLSASVGETVTITCRASGNIHNYLAWYQQKQGKSPQLLVYSAKTLADGVPSRFSGSGSGTQFSLKIDSLQPEDFGTYYCQHFWSLFPTFGGGTKLEIK

SEQ ID NO: 433 - protein, 107 aa, Artificial Sequence
  VL-60 Peptide Sequence
DVVMTQTPKFLLVSAGDRVTITCKASQSVSSDVAWYQQKPGQSPKLLIYFASNRYTGVPDRFTGSGYGTDFTFTISTVQAEDLAVYFCQHNYISPFTFGGGTKLEIK

SEQ ID NO: 434 - protein, 107 aa, Artificial Sequence
  VL-61 Peptide Sequence
DIVMTQSHKFMSTSVGDRVSITCKASQDVSTAVAWYQQKPGQSPKLLIYWASTRHTGVPDRFTGSGSGTDYTLTISSVQAEDLALYYCQQHYSTPYTFGGGTKLEIK

SEQ ID NO: 435 - protein, 107 aa, Artificial Sequence
  VL-62 Peptide Sequence
DIAMTQSHKFMSTSVGDRVSITCKASQDVSTAVAWYQQKPGQSPKLLIYWASTRHTGVPDRFTGSGSGTDYTLTISSVQAEDLALYYCQQHYNTPYTFGGGTKLEIK

SEQ ID NO: 436 - protein, 112 aa, Artificial Sequence
  VL-63 Peptide Sequence
DVGMTQTPLILSVTIGQPASISCKSSQSLLYINGKTYLNWLLQRPGQSPKRLIYLVSKLDSGVPNRFSGSGSGTDFTLKISRVEAEDLGVYYCLQSTHFPQTFGGGTKLEIK

SEQ ID NO: 437 - protein, 107 aa, Artificial Sequence
  VL-64 Peptide Sequence
DILLTQSPSSMSVSLGDTVSITCHASQGINSNIGWLQQKPGKSFKGLIYHGTNLEDGVPSRFSGSGSGADYSLTISSLESEDFADYYCVQYDQFPWTFGGGTKLEIK

SEQ ID NO: 438 - protein, 112 aa, Artificial Sequence
  VL-65 Peptide Sequence
DIVMTQAAPSVPVTPGESVSISCRSSRSLLHSNGYTYLYWFLQRPGQSPRLLIYRMSNLASGVPDRFSGSGSGTAFTLRISRVEAEDVGVYYCMQHLEYPYTFGGGTKLEIK

SEQ ID NO: 439 - protein, 107 aa, Artificial Sequence
  VL-66 Peptide Sequence
DIQMTQTTSSLSASLGDRVTISCSASQGISNYLNWYQQKPDGTVKLLIYYTSSLHSGVPSRFSGSGSGTDYSLTISNLEPEDIATYYCQQYSKLPRTFGGGTKLEIN

SEQ ID NO: 440 - protein, 112 aa, Artificial Sequence
  VL-67 Peptide Sequence
DVVMTQTPLTLSVTIGQPASISCKSSRSLLDSDGKTYLNWLLQRPGQSPKRLIYLVSKLDSGVPDRFTGSGSGTDFTLKISRVEAEDLGVYYCWQGTHFPQTFGGGTKLEIN

SEQ ID NO: 441 - protein, 107 aa, Artificial Sequence
  VL-68 Peptide Sequence
DIQMNQSPSSLSASLGDTITITCHASQNINVWLSWYQQKPGNIPKLLIYQASNLHTGVPSRFSGRGSGTGFTLTISSLQPEDIATYYCQQGQSSPFTFGSGTKLEIK

SEQ ID NO: 442 - protein, 107 aa, Artificial Sequence
  VL-69 Peptide Sequence
DILMTQSHKFMSTSVGDRVSITCKASQDVSSVVVWYQQKPGQSPKQLIYWASTRHTGVPDRFTGSGSGTDYTLTISSVQAEDLALYYCQQHYSTPYTFGGGTKLEIK

SEQ ID NO: 443 - protein, 109 aa, Artificial Sequence
  VL-70 Peptide Sequence
QAVVTQESALTTSPGETVTLTCRSSTGAVTTSNYANWDQEKPDHLFTGLIGGTNNRAPGVPARFSGSLIGDKAALTITGAQTEDEAIYFCALWYSNHLVFGGGTKVTVL

SEQ ID NO: 444 - protein, 111 aa, Artificial Sequence
  VL-71 Peptide Sequence
DIVMTQSPASLPVSLGQRATISCRASKSVTTSAYSYIHWYQQRPGQPPKLLIYLASNLESGVPARFSGSGSGTDFTLNIHPVEEEDAATYYCQHNRELPPTFGGGTKLEIN

SEQ ID NO: 445 - protein, 107 aa, Artificial Sequence
  VL-72 Peptide Sequence
DIVLTQSPATLSVTPGDSVSFSCRASQIINNNLHWYQQKSHESPRLLIRYTSQSISGIPSRFSGSGSGTDFTLSINNVETEDFGMYFCQQTNSWPLTFGAGTKLELK

SEQ ID NO: 446 - protein, 111 aa, Artificial Sequence
  VL-73 Peptide Sequence
DVVMTQTPLTLSVTIEQTASISCKSSQSLLDRDGKTYLNWLLQRPGQSPKRLIYLVSKLDSGVPDRFTGSGSGTDFTLKISRVEAEDLGVYYCWQGTHFPTFGGGTKLEIK

SEQ ID NO: 447 - protein, 107 aa, Artificial Sequence
  VL-74 Peptide Sequence
DVVMTQTPKFLPITAEDRVTITCKASQSVSNEVAWYQQKPGQSPKLLIYYASNRYTGVPDRFTGSGSGTDFTFTIRSVQLEDLAVYFCQQHYSSPWTFGGGTKLEIK

SEQ ID NO: 448 - protein, 442 aa, Artificial Sequence
  TB001 heavy chain peptide sequence
QVQLVQSGSELKKPGASVKVSCKASGYTFTNYGMNWVRQAPGQGLKWMGWINTNTGEPTYVEEFTGRFVFSLETSVSTAYLQISSLKAEDTAVYFCAPYDNFFAYWGQGTTVTVSSASTKGPSVFPLAPCSRSTSESTAALGCLVKDYFPEPVTVSWNSGALTSGVHTFPAVLQSSGLYSLSSVVTVPSSSLGTKTYTCNVDHKPSNTKVDKRVESKYGPPCPPCPAPEFLGGPSVFLFPPKPKDTLMISRTPEVTCVVVDVSQEDPEVQFNWYVDGVEVHNAKTKPREEQFNSTYRVVSVLTVLHQDWLNGKEYKCKVSNKGLPSSIEKTISKAKGQPREPQVYTLPPSQEEMTKNQVSLTCLVKGFYPSDIAVEWESNGQPENNYKTTPPVLDSDGSFFLYSRLTVDKSRWQEGNVFSCSVMHEALHNHYTQKSLSLSLG

SEQ ID NO: 449 - protein, 442 aa, Artificial Sequence
  TB006 heavy chain peptide sequence
QVQLVQSGAEVKKPGASVKVSCKASGYSFTNYYMHWVRQAPGQRLEWMGWIYPGSGNTNYNEKFQGRVTITADTSASTAYMELSSLRSEDTAVYYCSTAPGGFDVWGQGTTVTVSSASTKGPSVFPLAPCSRSTSESTAALGCLVKDYFPEPVTVSWNSGALTSGVHTFPAVLQSSGLYSLSSVVTVPSSSLGTKTYTCNVDHKPSNTKVDKRVESKYGPPCPPCPAPEFLGGPSVFLFPPKPKDTLMISRTPEVTCVVVDVSQEDPEVQFNWYVDGVEVHNAKTKPREEQFNSTYRVVSVLTVLHQDWLNGKEYKCKVSNKGLPSSIEKTISKAKGQPREPQVYTLPPSQEEMTKNQVSLTCLVKGFYPSDIAVEWESNGQPENNYKTTPPVLDSDGSFFLYSRLTVDKSRWQEGNVFSCSVMHEALHNHYTQKSLSLSLG

SEQ ID NO: 450 - protein, 452 aa, Artificial Sequence
  12G5.D7 heavy chain peptide sequence
QVQLKQSGAELVRPGASVKLSCKASGYTFTDYYINWVKQRPGQGLEWIARIYPGTGNTDYNEKFKGRATLTAEKSSSTAYMQLSSLTSEDSAVYFCARFAYYYGSGGYFDYWGHGTTLTVSSAKTTPPSVYPLAPVCGDTTGSSVTLGCLVKGYFPEPVTLTWNSGSLSSGVHTFPAVLQSDLYTLSSSVTVTSSTWPSQSITCNVAHPASSTKVDKKIEPRGPTIKPCPPCKCPAPNAAGGPSVFIFPPKIKDVLMISLSPIVTCVVVDVSEDDPDVQISWFVNNVEVHTAQTQTHREDYNSTLRVVSALPIQHQDWMSGKEFKCKVNNKDLGAPIERTISKPKGSVRAPQVYVLPPPEEEMTKKQVTLTCMVTDFMPEDIYVEWTNNGKTELNYKNTEPVLDSDGSYFMYSKLRVEKKNWVERNSYSCSVVHEGLHNHHTTKSFSRTPGK

SEQ ID NO: 451 - protein, 449 aa, Artificial Sequence
  13A12.2E5 heavy chain peptide sequence
QIQLVQSGPELKKPGETVKISCKTSGYKFKTYVMSWVKQAPGKALKWMGWINTYSGVPTYADDFKGRFAFSLETSASTAYLEIINLKNEDTATYFCARDGNYGDPMDYWGQGTSVTVSSAKTTPPSVYPLAPVCGDTTGSSVTLGCLVKGYFPEPVTLTWNSGSLSSGVHTFPAVLQSDLYTLSSSVTVTSSTWPSQSITCNVAHPASSTKVDKKIEPRGPTIKPCPPCKCPAPNAAGGPSVFIFPPKIKDVLMISLSPIVTCVVVDVSEDDPDVQISWFVNNVEVHTAQTQTHREDYNSTLRVVSALPIQHQDWMSGKEFKCKVNNKDLGAPIERTISKPKGSVRAPQVYVLPPPEEEMTKKQVTLTCMVTDFMPEDIYVEWTNNGKTELNYKNTEPVLDSDGSYFMYSKLRVEKKNWVERNSYSCSVVHEGLHNHHTTKSFSRTPGK

SEQ ID NO: 452 - protein, 447 aa, Artificial Sequence
  14H10.2C9 heavy chain peptide sequence
QIQLVQSGPELKKPGETVKISCKASGYTFTTYGMGWVKQAPGKDLKWMGWINTYSGVPTYADDFKGRFAFSLETSASTAYLQISNLKNEDTATYFCSTPYEYDGAYWGQGTLVTVSAAKTTPPSVYPLAPVCGDTTGSSVTLGCLVKGYFPEPVTLTWNSGSLSSGVHTFPAVLQSDLYTLSSSVTVTSSTWPSQSITCNVAHPASSTKVDKKIEPRGPTIKPCPPCKCPAPNAAGGPSVFIFPPKIKDVLMISLSPIVTCVVVDVSEDDPDVQISWFVNNVEVHTAQTQTHREDYNSTLRVVSALPIQHQDWMSGKEFKCKVNNKDLGAPIERTISKPKGSVRAPQVYVLPPPEEEMTKKQVTLTCMVTDFMPEDIYVEWTNNGKTELNYKNTEPVLDSDGSYFMYSKLRVEKKNWVERNSYSCSVVHEGLHNHHTTKSFSRTPGK

SEQ ID NO: 453 - protein, 443 aa, Artificial Sequence
  15F10.2D6 heavy chain peptide sequence
EVQLVESGGGLVKPGGSLKLSCAASGFAFSSYAMSWVRQTPEKRLEWVATISDGGVYTYYTDHVKGRFTISRDNAEDNLYLQMSHLKSEDTAMYYCVRDGGYWGQGTTLTVSSAKTTPPSVYPLAPVCGDTTGSSVTLGCLVKGYFPEPVTLTWNSGSLSSGVHTFPAVLQSDLYTLSSSVTVTSSTWPSQSITCNVAHPASSTKVDKKIEPRGPTIKPCPPCKCPAPNAAGGPSVFIFPPKIKDVLMISLSPIVTCVVVDVSEDDPDVQISWFVNNVEVHTAQTQTHREDYNSTLRVVSALPIQHQDWMSGKEFKCKVNNKDLGAPIERTISKPKGSVRAPQVYVLPPPEEEMTKKQVTLTCMVTDFMPEDIYVEWTNNGKTELNYKNTEPVLDSDGSYFMYSKLRVEKKNWVERNSYSCSVVHEGLHNHHTTKSFSRTPGK

SEQ ID NO: 454 - protein, 446 aa, Artificial Sequence
  19B5.2E6 heavy chain peptide sequence
QIQLVQSGPELKKPGETVKISCKASGYTFTTYAMSWVKQAPGKGLKWMGWINTYSGVPTYADDLKGRFAFSLETSASTAYLQINNLKNEDTATYFCARGPYAMDYWGQGTSVTVSSAKTTPPSVYPLAPVCGDTTGSSVTLGCLVKGYFPEPVTLTWNSGSLSSGVHTFPAVLQSDLYTLSSSVTVTSSTWPSQSITCNVAHPASSTKVDKKIEPRGPTIKPCPPCKCPAPNAAGGPSVFIFPPKIKDVLMISLSPIVTCVVVDVSEDDPDVQISWFVNNVEVHTAQTQTHREDYNSTLRVVSALPIQHQDWMSGKEFKCKVNNKDLGAPIERTISKPKGSVRAPQVYVLPPPEEEMTKKQVTLTCMVTDFMPEDIYVEWTNNGKTELNYKNTEPVLDSDGSYFMYSKLRVEKKNWVERNSYSCSVVHEGLHNHHTTKSFSRTPGK

SEQ ID NO: 455 - protein, 445 aa, Artificial Sequence
  20D11.2C6 heavy chain peptide sequence
EVQLQQSGPELVKPGASVKISCKASGYTFTDFYINWVKQSHGKSLEWIGDINPKNGGINYNPKFKIKATLTVDKSSSTSYMDLRGLTSEDSAVYYCTSGYGFPYWGQGTLVTVSAAKTTPPSVYPLAPVCGDTTGSSVTLGCLVKGYFPEPVTLTWNSGSLSSGVHTFPAVLQSDLYTLSSSVTVTSSTWPSQSITCNVAHPASSTKVDKKIEPRGPTIKPCPPCKCPAPNAAGGPSVFIFPPKIKDVLMISLSPIVTCVVVDVSEDDPDVQISWFVNNVEVHTAQTQTHREDYNSTLRVVSALPIQHQDWMSGKEFKCKVNNKDLGAPIERTISKPKGSVRAPQVYVLPPPEEEMTKKQVTLTCMVTDFMPEDIYVEWTNNGKTELNYKNTEPVLDSDGSYFMYSKLRVEKKNWVERNSYSCSVVHEGLHNHHTTKSFSRTPGK

SEQ ID NO: 456 - protein, 446 aa, Artificial Sequence
  20H5.A3 heavy chain peptide sequence
QIQLVQSGPELKKPGESVKISCKASGYAFTTYGMSWVQQAPGKGLKWMGWVNTYSGVPTCADDFKGRFAFSLETSASTAYLQINNLRNEDTATYFCARGPYAMDYWGQGTSVTVSSAKTTPPSVYPLAPVCGDTTGSSVTLGCLVKGYFPEPVTLTWNSGSLSSGVHTFPAVLQSDLYTLSSSVTVTSSTWPSQSITCNVAHPASSTKVDKKIEPRGPTIKPCPPCKCPAPNAAGGPSVFIFPPKIKDVLMISLSPIVTCVVVDVSEDDPDVQISWFVNNVEVHTAQTQTHREDYNSTLRVVSALPIQHQDWMSGKEFKCKVNNKDLGAPIERTISKPKGSVRAPQVYVLPPPEEEMTKKQVTLTCMVTDFMPEDIYVEWTNNGKTELNYKNTEPVLDSDGSYFMYSKLRVEKKNWVERNSYSCSVVHEGLHNHHTTKSFSRTPGK

SEQ ID NO: 457 - protein, 446 aa, Artificial Sequence; identical to SEQ ID NO: 454
  23H9.2E4 heavy chain peptide sequence

SEQ ID NO: 458 - protein, 450 aa, Artificial Sequence
  2D10.2B2 heavy chain peptide sequence
QVQLQQSGPELVKPGASVKISCKASGYTFTDYYINWVKQRPGQGLEWIGWIYPGSNDTKYNEKFKGKATLTVDTSSSTAYMQLGSLTSEDSAVYFCANYFGCSGWFFDVWGTGTTVTVSSAKTTPPSVYPLAPVCGDTTGSSVTLGCLVKGYFPEPVTLTWNSGSLSSGVHTFPAVLQSDLYTLSSSVTVTSSTWPSQSITCNVAHPASSTKVDKKIEPRGPTIKPCPPCKCPAPNAAGGPSVFIFPPKIKDVLMISLSPIVTCVVVDVSEDDPDVQISWFVNNVEVHTAQTQTHREDYNSTLRVVSALPIQHQDWMSGKEFKCKVNNKDLGAPIERTISKPKGSVRAPQVYVLPPPEEEMTKKQVTLTCMVTDFMPEDIYVEWTNNGKTELNYKNTEPVLDSDGSYFMYSKLRVEKKNWVERNSYSCSVVHEGLHNHHTTKSFSRTPGK

SEQ ID NO: 459 - protein, 449 aa, Artificial Sequence; identical to SEQ ID NO: 451
  3B11.2G2 heavy chain peptide sequence

SEQ ID NO: 460 - protein, 443 aa, Artificial Sequence
  7D8.2D8 heavy chain peptide sequence
EVQLVESGGGLVKPGGSLKLSCAASGFTFSSYAMSWVRQTPEKRLEWVATISDGGIYTYYPDNVKGRFTISRDNAKNNLFLQMSHLKSEDTAMYYCVRDGGYWGQGTTLTVSSAKTTPPSVYPLAPVCGDTTGSSVTLGCLVKGYFPEPVTLTWNSGSLSSGVHTFPAVLQSDLYTLSSSVTVTSSTWPSQSITCNVAHPASSTKVDKKIEPRGPTIKPCPPCKCPAPNAAGGPSVFIFPPKIKDVLMISLSPIVTCVVVDVSEDDPDVQISWFVNNVEVHTAQTQTHREDYNSTLRVVSALPIQHQDWMSGKEFKCKVNNKDLGAPIERTISKPKGSVRAPQVYVLPPPEEEMTKKQVTLTCMVTDFMPEDIYVEWTNNGKTELNYKNTEPVLDSDGSYFMYSKLRVEKKNWVERNSYSCSVVHEGLHNHHTTKSFSRTPGK

SEQ ID NO: 461 - protein, 446 aa, Artificial Sequence
  mTB001 heavy chain peptide sequence
QIQLVQSGPELKKPGETVKISCKASGYTFTNYGMNWVKQAPGKGLKWMGWINTNTGEPTYVEEFKGRFAFSLETSASTAYLQINNLKNEDTATYFCAPYDNFFAYWGQGTLVTVSAAKTTPPSVYPLAPVCGDTTGSSVTLGCLVKGYFPEPVTLTWNSGSLSSGVHTFPAVLQSDLYTLSSSVTVTSSTWPSQSITCNVAHPASSTKVDKKIEPRGPTIKPCPPCKCPAPNAAGGPSVFIFPPKIKDVLMISLSPIVTCVVVDVSEDDPDVQISWFVNNVEVHTAQTQTHREDYNSTLRVVSALPIQHQDWMSGKEFKCKVNNKDLGAPIERTISKPKGSVRAPQVYVLPPPEEEMTKKQVTLTCMVTDFMPEDIYVEWTNNGKTELNYKNTEPVLDSDGSYFMYSKLRVEKKNWVERNSYSCSVVHEGLHNHHTTKSFSRTPGK

SEQ ID NO: 462 - protein, 442 aa, Artificial Sequence
  4A11.2B5 heavy chain peptide sequence
QVQLQQSGPELVKPGASVKISCKASGYSFTNYYIHWVKQRPGQGLEWIGWIYPGSGNTNYNEKFKGKATLTADTSSSTTNMQLSSLTSEDSAVYYCSTAPGGFDVWGSGTTVTVSSASTKGPSVFPLAPCSRSTSESTAALGCLVKDYFPEPVTVSWNSGALTSGVHTFPAVLQSSGLYSLSSVVTVPSSSLGTKTYTCNVDHKPSNTKVDKRVESKYGPPCPPCPAPEFLGGPSVFLFPPKPKDTLMISRTPEVTCVVVDVSQEDPEVQFNWYVDGVEVHNAKTKPREEQFNSTYRVVSVLTVLHQDWLNGKEYKCKVSNKGLPSSIEKTISKAKGQPREPQVYTLPPSQEEMTKNQVSLTCLVKGFYPSDIAVEWESNGQPENNYKTTPPVLDSDGSFFLYSRLTVDKSRWQEGNVFSCSVMHEALHNHYTQKSLSLSLG

SEQ ID NO: 463 - protein, 442 aa, Artificial Sequence
  4A11.H1L1 heavy chain peptide sequence
QVQLVQSGAEVKKPGASVKVSCKASGYSFTNYYMHWVRQAPGQGLEWMGWIYPGSGNTNYNEKFQGRVTMTADTSISTAYMELSRLRSDDTAVYYCSTAPGGFDVWGQGTTVTVSSASTKGPSVFPLAPCSRSTSESTAALGCLVKDYFPEPVTVSWNSGALTSGVHTFPAVLQSSGLYSLSSVVTVPSSSLGTKTYTCNVDHKPSNTKVDKRVESKYGPPCPPCPAPEFLGGPSVFLFPPKPKDTLMISRTPEVTCVVVDVSQEDPEVQFNWYVDGVEVHNAKTKPREEQFNSTYRVVSVLTVLHQDWLNGKEYKCKVSNKGLPSSIEKTISKAKGQPREPQVYTLPPSQEEMTKNQVSLTCLVKGFYPSDIAVEWESNGQPENNYKTTPPVLDSDGSFFLYSRLTVDKSRWQEGNVFSCSVMHEALHNHYTQKSLSLSLG

SEQ ID NO: 464 - protein, 442 aa, Artificial Sequence
  4A11.H4L2 heavy chain peptide sequence
QVQLVQSGAEVKKPGASVKVSCKASGYSFTNYYIHWVRQAPGQRLEWMGWIYPGSGNTNYNEKFQGRVTLTADTSASTTYMELSSLRSEDTAVYYCSTAPGGFDVWGQGTTVTVSSASTKGPSVFPLAPCSRSTSESTAALGCLVKDYFPEPVTVSWNSGALTSGVHTFPAVLQSSGLYSLSSVVTVPSSSLGTKTYTCNVDHKPSNTKVDKRVESKYGPPCPPCPAPEFLGGPSVFLFPPKPKDTLMISRTPEVTCVVVDVSQEDPEVQFNWYVDGVEVHNAKTKPREEQFNSTYRVVSVLTVLHQDWLNGKEYKCKVSNKGLPSSIEKTISKAKGQPREPQVYTLPPSQEEMTKNQVSLTCLVKGFYPSDIAVEWESNGQPENNYKTTPPVLDSDGSFFLYSRLTVDKSRWQEGNVFSCSVMHEALHNHYTQKSLSLSLG

SEQ ID NO: 465 - protein, 445 aa, Artificial Sequence
  4G2.2G6 heavy chain peptide sequence
QIQLVQSGPDLKKPGETVKISCKASGYTFTTYVMSWVKQAPGKDLKWMGWINTHSGVPTYADDFKGRFDFSLETSANTAFLQINNLKNEDTATYFCTRDGNDGDAMDNWGQGTSVTVSSASTKGPSVFPLAPCSRSTSESTAALGCLVKDYFPEPVTVSWNSGALTSGVHTFPAVLQSSGLYSLSSVVTVPSSSLGTKTYTCNVDHKPSNTKVDKRVESKYGPPCPPCPAPEFLGGPSVFLFPPKPKDTLMISRTPEVTCVVVDVSQEDPEVQFNWYVDGVEVHNAKTKPREEQFNSTYRVVSVLTVLHQDWLNGKEYKCKVSNKGLPSSIEKTISKAKGQPREPQVYTLPPSQEEMTKNQVSLTCLVKGFYPSDIAVEWESNGQPENNYKTTPPVLDSDGSFFLYSRLTVDKSRWQEGNVFSCSVMHEALHNHYTQKSLSLSLG

SEQ ID NO: 466 - protein, 446 aa, Artificial Sequence
  6B3.2D3 heavy chain peptide sequence
QVQLKQSGPGLVQPSQSLSITCTVSGFSLTSYGVHWVRQPPGKGLEWLGVIWSGGSTDYNAAFISRLSISKDNSKSQVFFKMNSLQADDTAIYYCAKGPYDYDLGWFAYWGQGTLVTVSAASTKGPSVFPLAPCSRSTSESTAALGCLVKDYFPEPVTVSWNSGALTSGVHTFPAVLQSSGLYSLSSVVTVPSSSLGTKTYTCNVDHKPSNTKVDKRVESKYGPPCPPCPAPEFLGGPSVFLFPPKPKDTLMISRTPEVTCVVVDVSQEDPEVQFNWYVDGVEVHNAKTKPREEQFNSTYRVVSVLTVLHQDWLNGKEYKCKVSNKGLPSSIEKTISKAKGQPREPQVYTLPPSQEEMTKNQVSLTCLVKGFYPSDIAVEWESNGQPENNYKTTPPVLDSDGSFFLYSRLTVDKSRWQEGNVFSCSVMHEALHNHYTQKSLSLSLG

SEQ ID NO: 467 - protein, 442 aa, Artificial Sequence
  6H6.2D6 heavy chain peptide sequence
QIQLVQSGPELKKPGETVKISCKASGYTFTTYGMSWVKQAPGKGLKWMAWINTYSGVPTYADDFKGRFAFSLETSASTAYLQINNLTNEDTATYFCARGPYAMDYWGQGTSVTVSSASTKGPSVFPLAPCSRSTSESTAALGCLVKDYFPEPVTVSWNSGALTSGVHTFPAVLQSSGLYSLSSVVTVPSSSLGTKTYTCNVDHKPSNTKVDKRVESKYGPPCPPCPAPEFLGGPSVFLFPPKPKDTLMISRTPEVTCVVVDVSQEDPEVQFNWYVDGVEVHNAKTKPREEQFNSTYRVVSVLTVLHQDWLNGKEYKCKVSNKGLPSSIEKTISKAKGQPREPQVYTLPPSQEEMTKNQVSLTCLVKGFYPSDIAVEWESNGQPENNYKTTPPVLDSDGSFFLYSRLTVDKSRWQEGNVFSCSVMHEALHNHYTQKSLSLSLG

SEQ ID NO: 468 - protein, 441 aa, Artificial Sequence
  9H2.2H10 heavy chain peptide sequence
QVQLQQPGAELVGPGSSVKLSCKASGYTFTNYWIHWVKQRPLQGLEWIGNIDPSDSETHYNQKFKDKATLTVDKSSSTAYMQLSSLTSEDSAVYYCARHGYYDYWGQGTTLTVSSASTKGPSVFPLAPCSRSTSESTAALGCLVKDYFPEPVTVSWNSGALTSGVHTFPAVLQSSGLYSLSSVVTVPSSSLGTKTYTCNVDHKPSNTKVDKRVESKYGPPCPPCPAPEFLGGPSVFLFPPKPKDTLMISRTPEVTCVVVDVSQEDPEVQFNWYVDGVEVHNAKTKPREEQFNSTYRVVSVLTVLHQDWLNGKEYKCKVSNKGLPSSIEKTISKAKGQPREPQVYTLPPSQEEMTKNQVSLTCLVKGFYPSDIAVEWESNGQPENNYKTTPPVLDSDGSFFLYSRLTVDKSRWQEGNVFSCSVMHEALHNHYTQKSLSLSLG

SEQ ID NO: 469 - protein, 445 aa, Artificial Sequence
  13G4.2F8 heavy chain peptide sequence
QVQLQQPGAELVKPGASVKLSCKASGYTFTSYWMHWVKQRPGQGLEWIGMIHPNSGSTDYNEKFKNKATLNVDKSSSTAYIQLSSLTSEDSAVYYCTRWGIYYYARDYWGQGTTLTVSSASTKGPSVFPLAPCSRSTSESTAALGCLVKDYFPEPVTVSWNSGALTSGVHTFPAVLQSSGLYSLSSVVTVPSSSLGTKTYTCNVDHKPSNTKVDKRVESKYGPPCPPCPAPEFLGGPSVFLFPPKPKDTLMISRTPEVTCVVVDVSQEDPEVQFNWYVDGVEVHNAKTKPREEQFNSTYRVVSVLTVLHQDWLNGKEYKCKVSNKGLPSSIEKTISKAKGQPREPQVYTLPPSQEEMTKNQVSLTCLVKGFYPSDIAVEWESNGQPENNYKTTPPVLDSDGSFFLYSRLTVDKSRWQEGNVFSCSVMHEALHNHYTQKSLSLSLG

SEQ ID NO: 470 - protein, 443 aa, Artificial Sequence
  13H12.2F8 heavy chain peptide sequence
QIQLVQSGPELKKPGETVKISCKASGYTFTTYGMSWVKQAPGKGLKWMGWINTYSGVPTYADDFKGRFAFSLETSASTAYLQINNLKNEDTATYFCAVPYEYDGAYWGQGTLVTVSAASTKGPSVFPLAPCSRSTSESTAALGCLVKDYFPEPVTVSWNSGALTSGVHTFPAVLQSSGLYSLSSVVTVPSSSLGTKTYTCNVDHKPSNTKVDKRVESKYGPPCPPCPAPEFLGGPSVFLFPPKPKDTLMISRTPEVTCVVVDVSQEDPEVQFNWYVDGVEVHNAKTKPREEQFNSTYRVVSVLTVLHQDWLNGKEYKCKVSNKGLPSSIEKTISKAKGQPREPQVYTLPPSQEEMTKNQVSLTCLVKGFYPSDIAVEWESNGQPENNYKTTPPVLDSDGSFFLYSRLTVDKSRWQEGNVFSCSVMHEALHNHYTQKSLSLSLG

SEQ ID NO: 471 - protein, 441 aa, Artificial Sequence
  15G7.2A7 heavy chain peptide sequence
EVQLQQSGPELVKPGASVKISCKASGYTFTDYYMNWVKQSHGKSLEWIGDINPNNGGTNYNQKFKGKATLTVDKSSSTAYMELRSLTSEDSAVYYCTSGYGFPYWGQGTLVTVSAASTKGPSVFPLAPCSRSTSESTAALGCLVKDYFPEPVTVSWNSGALTSGVHTFPAVLQSSGLYSLSSVVTVPSSSLGTKTYTCNVDHKPSNTKVDKRVESKYGPPCPPCPAPEFLGGPSVFLFPPKPKDTLMISRTPEVTCVVVDVSQEDPEVQFNWYVDGVEVHNAKTKPREEQFNSTYRVVSVLTVLHQDWLNGKEYKCKVSNKGLPSSIEKTISKAKGQPREPQVYTLPPSQEEMTKNQVSLTCLVKGFYPSDIAVEWESNGQPENNYKTTPPVLDSDGSFFLYSRLTVDKSRWQEGNVFSCSVMHEALHNHYTQKSLSLSLG

SEQ ID NO: 472 - protein, 443 aa, Artificial Sequence
  19D9.2E5 heavy chain peptide sequence
QIQLVQSGPELKKPGETVKISCKASGYTFTTYGMGWVKQAPGKGLKWMGWINTYSGVPTYADDFKGRFAFSLETSTSTAYLQINNLKNEDMATYFCATPYEYDGAYWGQGTLVTVSAASTKGPSVFPLAPCSRSTSESTAALGCLVKDYFPEPVTVSWNSGALTSGVHTFPAVLQSSGLYSLSSVVTVPSSSLGTKTYTCNVDHKPSNTKVDKRVESKYGPPCPPCPAPEFLGGPSVFLFPPKPKDTLMISRTPEVTCVVVDVSQEDPEVQFNWYVDGVEVHNAKTKPREEQFNSTYRVVSVLTVLHQDWLNGKEYKCKVSNKGLPSSIEKTISKAKGQPREPQVYTLPPSQEEMTKNQVSLTCLVKGFYPSDIAVEWESNGQPENNYKTTPPVLDSDGSFFLYSRLTVDKSRWQEGNVFSCSVMHEALHNHYTQKSLSLSLG

SEQ ID NO: 473 - protein, 438 aa, Artificial Sequence
  23B10.2B12 heavy chain peptide sequence
QVQLQQSGPELVKPGDSVKISCKAAGYTFSDYYINWVKQRPGQGLEWIGWIYPVSVNTKYNEKFKGKATLTVDTSSSTAYMQLSSLTSEDSGVYFCAYLDYWGQGTLVTVSAASTKGPSVFPLAPCSRSTSESTAALGCLVKDYFPEPVTVSWNSGALTSGVHTFPAVLQSSGLYSLSSVVTVPSSSLGTKTYTCNVDHKPSNTKVDKRVESKYGPPCPPCPAPEFLGGPSVFLFPPKPKDTLMISRTPEVTCVVVDVSQEDPEVQFNWYVDGVEVHNAKTKPREEQFNSTYRVVSVLTVLHQDWLNGKEYKCKVSNKGLPSSIEKTISKAKGQPREPQVYTLPPSQEEMTKNQVSLTCLVKGFYPSDIAVEWESNGQPENNYKTTPPVLDSDGSFFLYSRLTVDKSRWQEGNVFSCSVMHEALHNHYTQKSLSLSLG

SEQ ID NO: 474 - protein, 446 aa, Artificial Sequence
  24D12.2H9 heavy chain peptide sequence
QVQLKQSGPGLVQPSQSLSITCTVSGFSLTSYGVHWVRQAPGKGLEWLGVIWSGGSTDYNAAFMSRLSISKDNSKSQVFFKMNSLQADDTAIYYCAKSPDGYDVAWFGYWGQGTLVTVSAASTKGPSVFPLAPCSRSTSESTAALGCLVKDYFPEPVTVSWNSGALTSGVHTFPAVLQSSGLYSLSSVVTVPSSSLGTKTYTCNVDHKPSNTKVDKRVESKYGPPCPPCPAPEFLGGPSVFLFPPKPKDTLMISRTPEVTCVVVDVSQEDPEVQFNWYVDGVEVHNAKTKPREEQFNSTYRVVSVLTVLHQDWLNGKEYKCKVSNKGLPSSIEKTISKAKGQPREPQVYTLPPSQEEMTKNQVSLTCLVKGFYPSDIAVEWESNGQPENNYKTTPPVLDSDGSFFLYSRLTVDKSRWQEGNVFSCSVMHEALHNHYTQKSLSLSLG

SEQ ID NO: 475 - protein, 448 aa, Artificial Sequence
  F846C.1B2 heavy chain peptide sequence
QIQLVQSGPELKKPGETVKISCKASGYTFTNYGMNWVKQAPGKGLKWMGWINTYTGEPSYADDFKGRFAFSLETSASTAYLQINNLKNEDMATYFCARWGGYAGDYYAMDFWGQGTSVTVSSASTKGPSVFPLAPCSRSTSESTAALGCLVKDYFPEPVTVSWNSGALTSGVHTFPAVLQSSGLYSLSSVVTVPSSSLGTKTYTCNVDHKPSNTKVDKRVESKYGPPCPPCPAPEFLGGPSVFLFPPKPKDTLMISRTPEVTCVVVDVSQEDPEVQFNWYVDGVEVHNAKTKPREEQFNSTYRVVSVLTVLHQDWLNGKEYKCKVSNKGLPSSIEKTISKAKGQPREPQVYTLPPSQEEMTKNQVSLTCLVKGFYPSDIAVEWESNGQPENNYKTTPPVLDSDGSFFLYSRLTVDKSRWQEGNVFSCSVMHEALHNHYTQKSLSLSLG

SEQ ID NO: 476 - protein, 448 aa, Artificial Sequence
  F846C.1F5 heavy chain peptide sequence
QIQLVQSGPELKKPGETVKISCKASGYTFTNYGMNWVKQAPGKGLKWMGWINTYTGEPSYADDFKGRFAFSLETSASTAYLQINNLKNEDMATYFCARWGGYDGDYYAMDYWGQGTSVTVSSASTKGPSVFPLAPCSRSTSESTAALGCLVKDYFPEPVTVSWNSGALTSGVHTFPAVLQSSGLYSLSSVVTVPSSSLGTKTYTCNVDHKPSNTKVDKRVESKYGPPCPPCPAPEFLGGPSVFLFPPKPKDTLMISRTPEVTCVVVDVSQEDPEVQFNWYVDGVEVHNAKTKPREEQFNSTYRVVSVLTVLHQDWLNGKEYKCKVSNKGLPSSIEKTISKAKGQPREPQVYTLPPSQEEMTKNQVSLTCLVKGFYPSDIAVEWESNGQPENNYKTTPPVLDSDGSFFLYSRLTVDKSRWQEGNVFSCSVMHEALHNHYTQKSLSLSLG

SEQ ID NO: 477 - protein, 448 aa, Artificial Sequence
  F846C.1H12 heavy chain peptide sequence
QIQLVQSGPELKKPGETVKISCKASGYTFTNFGMNWVKQAPGKGLKWMGWINTYTGEPSYADDFKGRFAFSLETSASTAYLQINNLKNEDIATYFCARWGGYAGDYYAMDYWGQGTSVTVSSASTKGPSVFPLAPCSRSTSESTAALGCLVKDYFPEPVTVSWNSGALTSGVHTFPAVLQSSGLYSLSSVVTVPSSSLGTKTYTCNVDHKPSNTKVDKRVESKYGPPCPPCPAPEFLGGPSVFLFPPKPKDTLMISRTPEVTCVVVDVSQEDPEVQFNWYVDGVEVHNAKTKPREEQFNSTYRVVSVLTVLHQDWLNGKEYKCKVSNKGLPSSIEKTISKAKGQPREPQVYTLPPSQEEMTKNQVSLTCLVKGFYPSDIAVEWESNGQPENNYKTTPPVLDSDGSFFLYSRLTVDKSRWQEGNVFSCSVMHEALHNHYTQKSLSLSLG

SEQ ID NO: 478 - protein, 442 aa, Artificial Sequence
  F846C.1H5 heavy chain peptide sequence
EVQLLESGGGLVKPGGSLKLSCAASGFTFSSYAMSWVRQTPEKRLEWVASISSGGDTYYPDSVKGRFTISRDNARNILYLQMSSLRSEDTAMYYCASYGNSLFDYWGQGTTLTVSSASTKGPSVFPLAPCSRSTSESTAALGCLVKDYFPEPVTVSWNSGALTSGVHTFPAVLQSSGLYSLSSVVTVPSSSLGTKTYTCNVDHKPSNTKVDKRVESKYGPPCPPCPAPEFLGGPSVFLFPPKPKDTLMISRTPEVTCVVVDVSQEDPEVQFNWYVDGVEVHNAKTKPREEQFNSTYRVVSVLTVLHQDWLNGKEYKCKVSNKGLPSSIEKTISKAKGQPREPQVYTLPPSQEEMTKNQVSLTCLVKGFYPSDIAVEWESNGQPENNYKTTPPVLDSDGSFFLYSRLTVDKSRWQEGNVFSCSVMHEALHNHYTQKSLSLSLG

SEQ ID NO: 479 - protein, 448 aa, Artificial Sequence; identical to SEQ ID NO: 476
  F846C.2H3 heavy chain peptide sequence

SEQ ID NO: 480 - protein, 440 aa, Artificial Sequence
  F846TC.14A2 heavy chain peptide sequence
QIQLVQSGPELKKPGETVKISCKASGYTFTNYGMNWVKQAPGKGLKWMGWINTYTGEPTYAGDLKGRFAFSLETSASTAYLQINNLKNEDTATYFCVRYTMDYWGQGTSVTVSSASTKGPSVFPLAPCSRSTSESTAALGCLVKDYFPEPVTVSWNSGALTSGVHTFPAVLQSSGLYSLSSVVTVPSSSLGTKTYTCNVDHKPSNTKVDKRVESKYGPPCPPCPAPEFLGGPSVFLFPPKPKDTLMISRTPEVTCVVVDVSQEDPEVQFNWYVDGVEVHNAKTKPREEQFNSTYRVVSVLTVLHQDWLNGKEYKCKVSNKGLPSSIEKTISKAKGQPREPQVYTLPPSQEEMTKNQVSLTCLVKGFYPSDIAVEWESNGQPENNYKTTPPVLDSDGSFFLYSRLTVDKSRWQEGNVFSCSVMHEALHNHYTQKSLSLSLG

SEQ ID NO: 481 - protein, 450 aa, Artificial Sequence
  F846TC.14E4 heavy chain peptide sequence
QVTLKESGPGILQPSQTLSLTCSFSGFSLSTSGMGVGWIRQPSGKGLEWLAHIWWDDDKYYNTALKSGLTISKDASKNQVFLKIASMDTADTATYYCARNLYDGSYGYYAMDYWGQGTSVTVSSASTKGPSVFPLAPCSRSTSESTAALGCLVKDYFPEPVTVSWNSGALTSGVHTFPAVLQSSGLYSLSSVVTVPSSSLGTKTYTCNVDHKPSNTKVDKRVESKYGPPCPPCPAPEFLGGPSVFLFPPKPKDTLMISRTPEVTCVVVDVSQEDPEVQFNWYVDGVEVHNAKTKPREEQFNSTYRVVSVLTVLHQDWLNGKEYKCKVSNKGLPSSIEKTISKAKGQPREPQVYTLPPSQEEMTKNQVSLTCLVKGFYPSDIAVEWESNGQPENNYKTTPPVLDSDGSFFLYSRLTVDKSRWQEGNVFSCSVMHEALHNHYTQKSLSLSLG

SEQ ID NO: 482 - protein, 448 aa, Artificial Sequence
  F846TC.16B5 heavy chain peptide sequence
QIQLVQSGPELKKPGETVKISCKASGYTFTNYGMNWVKQAPGKGLKWMGWINTYTGEPAYADDFKGRFAFSLETSASTAYLQINNLKNEDMATYFCARWGGYDGDYYAMDYWGQGTSVTVSSASTKGPSVFPLAPCSRSTSESTAALGCLVKDYFPEPVTVSWNSGALTSGVHTFPAVLQSSGLYSLSSVVTVPSSSLGTKTYTCNVDHKPSNTKVDKRVESKYGPPCPPCPAPEFLGGPSVFLFPPKPKDTLMISRTPEVTCVVVDVSQEDPEVQFNWYVDGVEVHNAKTKPREEQFNSTYRVVSVLTVLHQDWLNGKEYKCKVSNKGLPSSIEKTISKAKGQPREPQVYTLPPSQEEMTKNQVSLTCLVKGFYPSDIAVEWESNGQPENNYKTTPPVLDSDGSFFLYSRLTVDKSRWQEGNVFSCSVMHEALHNHYTQKSLSLSLG

SEQ ID NO: 483 - protein, 449 aa, Artificial Sequence
  F846TC.7F10 heavy chain peptide sequence
EVQLVESGGDLVKPGGSLKLSCAASGFTFSNYGLSWIRQTPDKRLEWVATISSGGSYTYYPDSVKGRFTISRDSAKNTLYLQMSSLKSEDTAMYYCARHAHYYGVSPYYFDYWGQGTCLTVSSASTKGPSVFPLAPCSRSTSESTAALGCLVKDYFPEPVTVSWNSGALTSGVHTFPAVLQSSGLYSLSSVVTVPSSSLGTKTYTCNVDHKPSNTKVDKRVESKYGPPCPPCPAPEFLGGPSVFLFPPKPKDTLMISRTPEVTCVVVDVSQEDPEVQFNWYVDGVEVHNAKTKPREEQFNSTYRVVSVLTVLHQDWLNGKEYKCKVSNKGLPSSIEKTISKAKGQPREPQVYTLPPSQEEMTKNQVSLTCLVKGFYPSDIAVEWESNGQPENNYKTTPPVLDSDGSFFLYSRLTVDKSRWQEGNVFSCSVMHEALHNHYTQKSLSLSLG

SEQ ID NO: 484 - protein, 445 aa, Artificial Sequence
  F847C.10B9 heavy chain peptide sequence
QIQLVQSGPEVKKPGETVKISCKASGYIFTNYGMNWVKQAPGKGLKWMGWINTYTGEPTYTDDFKGRFAFSLETSASTAYLQINNLKNEDTATYFCAKFGNYVGAMDYWGQGTSVTVSSASTKGPSVFPLAPCSRSTSESTAALGCLVKDYFPEPVTVSWNSGALTSGVHTFPAVLQSSGLYSLSSVVTVPSSSLGTKTYTCNVDHKPSNTKVDKRVESKYGPPCPPCPAPEFLGGPSVFLFPPKPKDTLMISRTPEVTCVVVDVSQEDPEVQFNWYVDGVEVHNAKTKPREEQFNSTYRVVSVLTVLHQDWLNGKEYKCKVSNKGLPSSIEKTISKAKGQPREPQVYTLPPSQEEMTKNQVSLTCLVKGFYPSDIAVEWESNGQPENNYKTTPPVLDSDGSFFLYSRLTVDKSRWQEGNVFSCSVMHEALHNHYTQKSLSLSLG

SEQ ID NO: 485 - protein, 446 aa, Artificial Sequence
  F847C.11B1 heavy chain peptide sequence
EVQLQQSGPELVKPGASVKISCKASGNTFTDHNMHWVKQSHGKSLEWIGYIYPYNGGTGYNQKFKSKATLTVDNSSSTVYMELRSLTSEDSAVYYCARGEYDYLAWFAYWGQGTLVTVSAASTKGPSVFPLAPCSRSTSESTAALGCLVKDYFPEPVTVSWNSGALTSGVHTFPAVLQSSGLYSLSSVVTVPSSSLGTKTYTCNVDHKPSNTKVDKRVESKYGPPCPPCPAPEFLGGPSVFLFPPKPKDTLMISRTPEVTCVVVDVSQEDPEVQFNWYVDGVEVHNAKTKPREEQFNSTYRVVSVLTVLHQDWLNGKEYKCKVSNKGLPSSIEKTISKAKGQPREPQVYTLPPSQEEMTKNQVSLTCLVKGFYPSDIAVEWESNGQPENNYKTTPPVLDSDGSFFLYSRLTVDKSRWQEGNVFSCSVMHEALHNHYTQKSLSLSLG

SEQ ID NO: 486 - protein, 445 aa, Artificial Sequence
  F847C.12F12 heavy chain peptide sequence
QIQLVQSGPELKKPGETVKISCKASGYTFTNYGMNWVKQAPGKGLKWMGWINTYTGEPTYVDDFKGRFAFSLETSASTAYLRINNLKNEDTATYFCAKFGNYVGAMDYWGQGTSVTVSSASTKGPSVFPLAPCSRSTSESTAALGCLVKDYFPEPVTVSWNSGALTSGVHTFPAVLQSSGLYSLSSVVTVPSSSLGTKTYTCNVDHKPSNTKVDKRVESKYGPPCPPCPAPEFLGGPSVFLFPPKPKDTLMISRTPEVTCVVVDVSQEDPEVQFNWYVDGVEVHNAKTKPREEQFNSTYRVVSVLTVLHQDWLNGKEYKCKVSNKGLPSSIEKTISKAKGQPREPQVYTLPPSQEEMTKNQVSLTCLVKGFYPSDIAVEWESNGQPENNYKTTPPVLDSDGSFFLYSRLTVDKSRWQEGNVFSCSVMHEALHNHYTQKSLSLSLG

SEQ ID NO: 487 - protein, 445 aa, Artificial Sequence; identical to SEQ ID NO: 484
  F847C.26F5 heavy chain peptide sequence

SEQ ID NO: 488 - protein, 443 aa, Artificial Sequence
  F847C.4B10 heavy chain peptide sequence
EVQLVETGGGLVKPGGSLKLSCAASGFTFSSYAMSWVRQTPEKRLEWVASISSGGSTYYPDSVKGRFTISRDNARNILYLQMSSLRSEDTAMYYCTRFTTVVEMDYWGQGTSVTVSSASTKGPSVFPLAPCSRSTSESTAALGCLVKDYFPEPVTVSWNSGALTSGVHTFPAVLQSSGLYSLSSVVTVPSSSLGTKTYTCNVDHKPSNTKVDKRVESKYGPPCPPCPAPEFLGGPSVFLFPPKPKDTLMISRTPEVTCVVVDVSQEDPEVQFNWYVDGVEVHNAKTKPREEQFNSTYRVVSVLTVLHQDWLNGKEYKCKVSNKGLPSSIEKTISKAKGQPREPQVYTLPPSQEEMTKNQVSLTCLVKGFYPSDIAVEWESNGQPENNYKTTPPVLDSDGSFFLYSRLTVDKSRWQEGNVFSCSVMHEALHNHYTQKSLSLSLG

SEQ ID NO: 489 - protein, 438 aa, Artificial Sequence
  F849C.8D10 heavy chain peptide sequence
QVQLQQTGAELVKPGASVKLSCKASGYTFTSYWINWVKQRPGQGLEWIGNIYPGSSSIYYSEKFKSKATLTVDTSSSTAYMQLSSLTSDDSAVYYCARWGYWGQGTTLTVSSASTKGPSVFPLAPCSRSTSESTAALGCLVKDYFPEPVTVSWNSGALTSGVHTFPAVLQSSGLYSLSSVVTVPSSSLGTKTYTCNVDHKPSNTKVDKRVESKYGPPCPPCPAPEFLGGPSVFLFPPKPKDTLMISRTPEVTCVVVDVSQEDPEVQFNWYVDGVEVHNAKTKPREEQFNSTYRVVSVLTVLHQDWLNGKEYKCKVSNKGLPSSIEKTISKAKGQPREPQVYTLPPSQEEMTKNQVSLTCLVKGFYPSDIAVEWESNGQPENNYKTTPPVLDSDGSFFLYSRLTVDKSRWQEGNVFSCSVMHEALHNHYTQKSLSLSLG

SEQ ID NO: 490 - protein, 447 aa, Artificial Sequence
  F849C.8H3 heavy chain peptide sequence
QVTLKESGPGILQPSQTLSLTCSFSGFSLSTFGMGVGWIRQPSGKGLEWLAHIWWDDDKHYNPALKSRLTISKDTSKNQVFLRIANVDTADNATYYCARIDYGDYVGFAYWGQGTLVTVSAASTKGPSVFPLAPCSRSTSESTAALGCLVKDYFPEPVTVSWNSGALTSGVHTFPAVLQSSGLYSLSSVVTVPSSSLGTKTYTCNVDHKPSNTKVDKRVESKYGPPCPPCPAPEFLGGPSVFLFPPKPKDTLMISRTPEVTCVVVDVSQEDPEVQFNWYVDGVEVHNAKTKPREEQFNSTYRVVSVLTVLHQDWLNGKEYKCKVSNKGLPSSIEKTISKAKGQPREPQVYTLPPSQEEMTKNQVSLTCLVKGFYPSDIAVEWESNGQPENNYKTTPPVLDSDGSFFLYSRLTVDKSRWQEGNVFSCSVMHEALHNHYTQKSLSLSLG

SEQ ID NO: 491 - protein, 444 aa, Artificial Sequence
  846.2B11 heavy chain peptide sequence
QVQLQQSGPELVRPGALVKISCKASGYTFTSYDINWVKQRPGQGLEWIGWIYPGDGSTKYNEKFKGKATLTADKSSSTAYMQLSSLTSENSAVYFCAREAASNAMDYWGQGTSVTVSSASTKGPSVFPLAPCSRSTSESTAALGCLVKDYFPEPVTVSWNSGALTSGVHTFPAVLQSSGLYSLSSVVTVPSSSLGTKTYTCNVDHKPSNTKVDKRVESKYGPPCPPCPAPEFLGGPSVFLFPPKPKDTLMISRTPEVTCVVVDVSQEDPEVQFNWYVDGVEVHNAKTKPREEQFNSTYRVVSVLTVLHQDWLNGKEYKCKVSNKGLPSSIEKTISKAKGQPREPQVYTLPPSQEEMTKNQVSLTCLVKGFYPSDIAVEWESNGQPENNYKTTPPVLDSDGSFFLYSRLTVDKSRWQEGNVFSCSVMHEALHNHYTQKSLSLSLG

SEQ ID NO: 492 - protein, 448 aa, Artificial Sequence
  846.4D5 heavy chain peptide sequence
EVKLEESGGGLVQPGGSMKLSCVASGFTFSNYWMNWVRQSPEKGLEWVAEIRLKSNNYATHYAESVKGRFTISRDDSKSSVYLQMNNLRAEDTGIYYCTRHYGFPYWYFDVWGAGTTVTVSSASTKGPSVFPLAPCSRSTSESTAALGCLVKDYFPEPVTVSWNSGALTSGVHTFPAVLQSSGLYSLSSVVTVPSSSLGTKTYTCNVDHKPSNTKVDKRVESKYGPPCPPCPAPEFLGGPSVFLFPPKPKDTLMISRTPEVTCVVVDVSQEDPEVQFNWYVDGVEVHNAKTKPREEQFNSTYRVVSVLTVLHQDWLNGKEYKCKVSNKGLPSSIEKTISKAKGQPREPQVYTLPPSQEEMTKNQVSLTCLVKGFYPSDIAVEWESNGQPENNYKTTPPVLDSDGSFFLYSRLTVDKSRWQEGNVFSCSVMHEALHNHYTQKSLSLSLG

SEQ ID NO: 493 - protein, 444 aa, Artificial Sequence
  846T.1H2 heavy chain peptide sequence
QIQLVQSGPELKKPGETVKISCKASGYTFTNYGMNWVKQAPGKGLKWMGWINTNTGEPTYAEEFKGRFAFSLETSASTAYLQINNLKNEDTATYFCATGGGNWDFDYWGQGTTLTVSSASTKGPSVFPLAPCSRSTSESTAALGCLVKDYFPEPVTVSWNSGALTSGVHTFPAVLQSSGLYSLSSVVTVPSSSLGTKTYTCNVDHKPSNTKVDKRVESKYGPPCPPCPAPEFLGGPSVFLFPPKPKDTLMISRTPEVTCVVVDVSQEDPEVQFNWYVDGVEVHNAKTKPREEQFNSTYRVVSVLTVLHQDWLNGKEYKCKVSNKGLPSSIEKTISKAKGQPREPQVYTLPPSQEEMTKNQVSLTCLVKGFYPSDIAVEWESNGQPENNYKTTPPVLDSDGSFFLYSRLTVDKSRWQEGNVFSCSVMHEALHNHYTQKSLSLSLG

SEQ ID NO: 494 - protein, 440 aa, Artificial Sequence
  847.14H4 heavy chain peptide sequence
QIQLVQSGPELTKPGETVKISCKASGYTFTDYGMNWVRQAPGETLKWMGWINTYTGEPTYADDFKGRFAFSLESSASTAYLQINNLKNEDVATYFCARYPMDYWGQGTSVTVSSASTKGPSVFPLAPCSRSTSESTAALGCLVKDYFPEPVTVSWNSGALTSGVHTFPAVLQSSGLYSLSSVVTVPSSSLGTKTYTCNVDHKPSNTKVDKRVESKYGPPCPPCPAPEFLGGPSVFLFPPKPKDTLMISRTPEVTCVVVDVSQEDPEVQFNWYVDGVEVHNAKTKPREEQFNSTYRVVSVLTVLHQDWLNGKEYKCKVSNKGLPSSIEKTISKAKGQPREPQVYTLPPSQEEMTKNQVSLTCLVKGFYPSDIAVEWESNGQPENNYKTTPPVLDSDGSFFLYSRLTVDKSRWQEGNVFSCSVMHEALHNHYTQKSLSLSLG

SEQ ID NO: 495 - protein, 219 aa, Artificial Sequence
  TB001 light chain peptide sequence
DIVLTQSPLSLPVTPGEPASISCRSSKSLLYKDGKTYLNWFLQKPGQSPQLLIYLMSTHASGVPDRFSGSGSGTDFTLKISRVEAEDVGVYYCQQLVDYPLTFGGGTKLEIKRTVAAPSVFIFPPSDEQLKSGTASVVCLLNNFYPREAKVQWKVDNALQSGNSQESVTEQDSKDSTYSLSSTLTLSKADYEKHKVYACEVTHQGLSSPVTKSFNRGEC

SEQ ID NO: 496 - protein, 219 aa, Artificial Sequence
  TB006 light chain peptide sequence
DIVMTQTPLSLSVTPGQPASISCKSSKSLLHSDGITYLYWYLQKPGQSPQLLIYRMSNLASGVPDRFSGSGSGTDFTLKISRVEAEDVGVYYCAQMLEFPLTFGQGTKLEIKRTVAAPSVFIFPPSDEQLKSGTASVVCLLNNFYPREAKVQWKVDNALQSGNSQESVTEQDSKDSTYSLSSTLTLSKADYEKHKVYACEVTHQGLSSPVTKSFNRGEC

SEQ ID NO: 497 - protein, 214 aa, Artificial Sequence
  12G5.D7 light chain peptide sequence
DILMTQSPSSMSVSLGDTVSITCHASQGINSNMGWLQQKPGKSFKGLIYHATNLEDGVPSRFSGSGSGADYSLTISSLESEDFADYYCVQYAQFPPTFGSGTKLEIKRADVAPTVSIFPPSSEQLTSGGASVVCFLNNFYPKDINVKWKIDGSERQNGVLNSWTDQDSKDSTYSMSSTLTLTKDEYERHNSYTCEATHKTSTSPIVKSFNRNEC

SEQ ID NO: 498 - protein, 219 aa, Artificial Sequence
  13A12.2E5 light chain peptide sequence
DVVMTQTPLTLSVAIGQPASISCKSSQSLLYTNGKTYLNWLLQRPGQSPKRLIYLLSKLDSGVPDRFSASGSGTDFTLKISRVEAEDLGVYYCLQSTHFPLTFGAGTKLEMKRADVAPTVSIFPPSSEQLTSGGASVVCFLNNFYPKDINVKWKIDGSERQNGVLNSWTDQDSKDSTYSMSSTLTLTKDEYERHNSYTCEATHKTSTSPIVKSFNRNEC

SEQ ID NO: 499 - protein, 219 aa, Artificial Sequence
  14H10.2C9 light chain peptide sequence
DVVMTQTPLTLSVTIGQPASISCKSSQSLFDSDGKTYLNWLLQRPGQSPKRLIYLVSKLDSGVPDRFTGSGSGTDFTLKISRVEAEDLGVYYCWQGTHFPLTFGAGTKLEMKRADVAPTVSIFPPSSEQLTSGGASVVCFLNNFYPKDINVKWKIDGSERQNGVLNSWTDQDSKDSTYSMSSTLTLTKDEYERHNSYTCEATHKTSTSPIVKSFNRNEC

SEQ ID NO: 500 - protein, 219 aa, Artificial Sequence
  15F10.2D6 light chain peptide sequence
DVLMTQTPLSLPVSLGDQASISCRSSQSIVHNNGNTYLEWYLQKPGQSPKLLIYKVSNRFSGVPDRFSGSGSGTDFTLKISRVEAEDLGVYYCFQGSHVPLTFGGGTKLELKRADVAPTVSIFPPSSEQLTSGGASVVCFLNNFYPKDINVKWKIDGSERQNGVLNSWTDQDSKDSTYSMSSTLTLTKDEYERHNSYTCEATHKTSTSPIVKSFNRNEC

SEQ ID NO: 501 - protein, 214 aa, Artificial Sequence
  19B5.2E6/23H9.2E4 light chain peptide sequence
DIQMTQTTSSLSASLGDRVTISCSASQGINNYLNWYQQKPDGTVKLLIYYASSLHSGVPSRFSGSGSGTDYSLTISNLEPEDIATYYCQQYSQVPYTFGSGTKLEIKRADVAPTVSIFPPSSEQLTSGGASVVCFLNNFYPKDINVKWKIDGSERQNGVLNSWTDQDSKDSTYSMSSTLTLTKDEYERHNSYTCEATHKTSTSPIVKSFNRNEC

SEQ ID NO: 502 - protein, 214 aa, Artificial Sequence
  20D11.2C6 light chain peptide sequence
DIQMNQSPSSLSASLGDTITITCRASQNIYIWLSWYQQKPGNIPKLLIYKASNLHTGVPSRFSGSGSGTDFTLTISTLQPEDIATYFCLQGQSYPLTFGAGTKLEMKRADVAPTVSIFPPSSEQLTSGGASVVCFLNNFYPKDINVKWKIDGSERQNGVLNSWTDQDSKDSTYSMSSTLTLTKDEYERHNSYTCEATHKTSTSPIVKSFNRNEC

SEQ ID NO: 503 - protein, 214 aa, Artificial Sequence
  20H5.A3 light chain peptide sequence
DIQMTQTTSSLSASLGDRVTINCSASQDISNYLNWYQQKPDGTVKLLIYYTSSLLSGVPSRFSGSGSGTDYSLTISNLEPEDIATYFCQQYSKLPYTFGSGTHLEIKRADVAPTVSIFPPSSEQLTSGGASVVCFLNNFYPKDINVKWKIDGSERQNGVLNSWTDQDSKDSTYSMSSTLTLTKDEYERHNSYTCEATHKTSTSPIVKSFNRNEC

SEQ ID NO: 504 - protein, 219 aa, Artificial Sequence
  2D10.2B2 light chain peptide sequence
DIVMTQAAFSNPVTLGTSASISCRSSKSLLHSDGITYLYWYLQRPGQSPQLLIYRMSNLASGVPDRFSGSGSGTDFTLRISRVEAEDVGVYYCAQMIEFPLTFGAGTILELKRADVAPTVSIFPPSSEQLTSGGASVVCFLNNFYPKDINVKWKIDGSERQNGVLNSWTDQDSKDSTYSMSSTLTLTKDEYERHNSYTCEATHKTSTSPIVKSFNRNEC

SEQ ID NO: 505 - protein, 219 aa, Artificial Sequence
  3B11.2G2 light chain peptide sequence
DVVMTQTPLTLSVAIGQPASISCKSSQSLLYTNGKTYLNWLLQRPGQSPKRLIYLVSKLDSGVPDRFSGSGSGTDFTLKISRVEAEDLGVYYCLQSTHFPLTFGAGTKLELKRADVAPTVSIFPPSSEQLTSGGASVVCFLNNFYPKDINVKWKIDGSERQNGVLNSWTDQDSKDSTYSMSSTLTLTKDEYERHNSYTCEATHKTSTSPIVKSFNRNEC

SEQ ID NO: 506 - protein, 219 aa, Artificial Sequence
  7D8.2D8 light chain peptide sequence
DVLMTQTPLSLPVSLGDQASISCRSSQSIVHSNGNTYLEWYLQKPGQSPKLLIYKVSNRFSGVPDRFSGSGSGTDFTLKISRVEAEDLGVYYCFQGSHVPLTFGAGTKLELKRADVAPTVSIFPPSSEQLTSGGASVVCFLNNFYPKDINVKWKIDGSERQNGVLNSWTDQDSKDSTYSMSSTLTLTKDEYERHNSYTCEATHKTSTSPIVKSFNRNEC

SEQ ID NO: 507 - protein, 219 aa, Artificial Sequence
  mTB001 light chain peptide sequence
DIVITQDELSNPVTSGESVSISCRSSKSLLYKDGKTYLNWFLQRPGQSPQLLIYLMSTHASGVSDRFSGSGSGTDFTLEISRVKAEDVGVYYCQQLVDYPLTFGAGTKLELKRADVAPTVSIFPPSSEQLTSGGASVVCFLNNFYPKDINVKWKIDGSERQNGVLNSWTDQDSKDSTYSMSSTLTLTKDEYERHNSYTCEATHKTSTSPIVKSFNRNEC

SEQ ID NO: 508 - protein, 219 aa, Artificial Sequence
  4A11.2B5 light chain peptide sequence
DIVMTQAAFSNPVTLGTSASISCRSSKSLLHSDGITYLYWYLQRPGQSPQLLIYRMSNLASGVPDRFSGSGSGTDFTLRISRVEAEDVGVYYCAQMLEFPLTFGAGTKLELKRTVAAPSVFIFPPSDEQLKSGTASVVCLLNNFYPREAKVQWKVDNALQSGNSQESVTEQDSKDSTYSLSSTLTLSKADYEKHKVYACEVTHQGLSSPVTKSFNRGEC

SEQ ID NO: 509 - protein, 219 aa, Artificial Sequence; identical to SEQ ID NO: 496
  4A11.H1L1 light chain peptide sequence

SEQ ID NO: 510 - protein, 219 aa, Artificial Sequence
  4A11.H4L2 light chain peptide sequence
DIVMTQSPLSLPVTPGEPASISCRSSKSLLHSDGITYLYWYLQKPGQSPQLLIYRMSNLASGVPDRFSGSGSGTDFTLKISRVEAEDVGVYYCAQMLEFPLTFGQGTKLEIKRTVAAPSVFIFPPSDEQLKSGTASVVCLLNNFYPREAKVQWKVDNALQSGNSQESVTEQDSKDSTYSLSSTLTLSKADYEKHKVYACEVTHQGLSSPVTKSFNRGEC

SEQ ID NO: 511 - protein, 219 aa, Artificial Sequence
  4G2.2G6 light chain peptide sequence
DVVMTQTPLTLSVTIGQPASISCKSSQSLLYTDGKTYLSWFLQRPGQSPKRLIYLVSKLDSGVPDRFSGSGSGTDFTLKISRVEAEDLGVYYCLQSTHFPLTFGAGTKLEVKRTVAAPSVFIFPPSDEQLKSGTASVVCLLNNFYPREAKVQWKVDNALQSGNSQESVTEQDSKDSTYSLSSTLTLSKADYEKHKVYACEVTHQGLSSPVTKSFNRGEC

SEQ ID NO: 512 - protein, 214 aa, Artificial Sequence
  6B3.2D3 light chain peptide sequence
SIVMTQTPKFLLVSAGDRVTITCKASQSVSNDVAWYQQKPGQSPKLLIYYASNRYTGVPDRFTGSGYGTDFTFTISTVQAEDLAVYFCQQDYTSPYTFGGGTKLEIKRTVAAPSVFIFPPSDEQLKSGTASVVCLLNNFYPREAKVQWKVDNALQSGNSQESVTEQDSKDSTYSLSSTLTLSKADYEKHKVYACEVTHQGLSSPVTKSFNRGEC

SEQ ID NO: 513 - protein, 214 aa, Artificial Sequence
  6H6.2D6 light chain peptide sequence
DIQMTQTTSSLSASLGDRVTISCSASQGISNYLNWYQQKPDGTVKLLIYYTSSLHSGVPSRFSGSGSGTDYSLTISNLEPEDIATYYCQQYSELPYTFGSGTKLEIKRTVAAPSVFIFPPSDEQLKSGTASVVCLLNNFYPREAKVQWKVDNALQSGNSQESVTEQDSKDSTYSLSSTLTLSKADYEKHKVYACEVTHQGLSSPVTKSFNRGEC

SEQ ID NO: 514 - protein, 214 aa, Artificial Sequence
  9H2.2H10 light chain peptide sequence
DIVMTQSHKFMSTSVGDRVSITCKASQDVSTAVAWYQQKPGQSPKLLIYWASTRHTGVPDRFTGSGSGTDYTLTISSVQAEDLALYYCQQHYTTPLTFGAGTKLELKRTVAAPSVFIFPPSDEQLKSGTASVVCLLNNFYPREAKVQWKVDNALQSGNSQESVTEQDSKDSTYSLSSTLTLSKADYEKHKVYACEVTHQGLSSPVTKSFNRGEC

SEQ ID NO: 515 - protein, 214 aa, Artificial Sequence
  13G4.2F8 light chain peptide sequence
DIVMTQSQKFMSTSVGERVSITCKASQNVGTNVAWYQQKAGQSLELLIYGASNRHTGVPDRFTGSGSGTDFTLTITNVQSEDMTNYFCEQYSNFPLTFGAGTKLELKRTVAAPSVFIFPPSDEQLKSGTASVVCLLNNFYPREAKVQWKVDNALQSGNSQESVTEQDSKDSTYSLSSTLTLSKADYEKHKVYACEVTHQGLSSPVTKSFNRGEC

SEQ ID NO: 516 - protein, 219 aa, Artificial Sequence
  13H12.2F8 light chain peptide sequence
DVVMTQTPLTLSVTIGQPASISCKSSQSLFHSDGKTYLNWLLQRPGQSPKRLIYLVSKLDSGVPDRFTGSGSGTDFTPKISRVEDEDLGVYYCWQGTHFPLTFGAGTKLEMKRTVAAPSVFIFPPSDEQLKSGTASVVCLLNNFYPREAKVQWKVDNALQSGNSQESVTEQDSKDSTYSLSSTLTLSKADYEKHKVYACEVTHQGLSSPVTKSFNRGEC

SEQ ID NO: 517 - protein, 214 aa, Artificial Sequence
  15G7.2A7 light chain peptide sequence
DIQMNQSPSSLSASLGDTISITCRASQNINIWLSWYQQKPGNIPQLLIYKASNLHTGVPSRFSGSGSGTDFTLTISSLQPEDIATYYCLQGQSYPLTFGAGTKLVMKRTVAAPSVFIFPPSDEQLKSGTASVVCLLNNFYPREAKVQWKVDNALQSGNSQESVTEQDSKDSTYSLSSTLTLSKADYEKHKVYACEVTHQGLSSPVTKSFNRGEC

SEQ ID NO: 518 - protein, 217 aa, Artificial Sequence
  19D9.2E5 light chain peptide sequence
DVVMTQTPLTLSVTIGQPASISCKSSQSLLHSDGKTYLNWLLQRPGQPPKRLMYLVSTLDSGVPDRFTGSGSGTDFTLKISRVEAEDLGVYYCWQGTHFPLTFGAGTKPERTVAAPSVFIFPPSDEQLKSGTASVVCLLNNFYPREAKVQWKVDNALQSGNSQESVTEQDSKDSTYSLSSTLTLSKADYEKHKVYACEVTHQGLSSPVTKSFNRGEC

SEQ ID NO: 519 - protein, 217 aa, Artificial Sequence
  23B10.2B12 light chain peptide sequence
DIVMTQAAFSNPVTLGTSASISCRSSKSLLHSDGITYFYWYLQRPGQSPQLLIYRMSNLASGVPDRFSGSGSGTDFTLRISRVEAEDVGVYYCAQMLEFPLTFGAGTKLERTVAAPSVFIFPPSDEQLKSGTASVVCLLNNFYPREAKVQWKVDNALQSGNSQESVTEQDSKDSTYSLSSTLTLSKADYEKHKVYACEVTHQGLSSPVTKSFNRGEC

SEQ ID NO: 520 - protein, 214 aa, Artificial Sequence
  24D12.2H9 light chain peptide sequence
DIVMTQSHKFMSTSVGDRVSITCKASQDVRTAVAWYQQKPGQSPKLLIYWASTRHTGVPDRFTGSGSGTDFTLTLSNVQSEDLADYFCQQYSSYPWTFGGGTKLEIKRTVAAPSVFIFPPSDEQLKSGTASVVCLLNNFYPREAKVQWKVDNALQSGNSQESVTEQDSKDSTYSLSSTLTLSKADYEKHKVYACEVTHQGLSSPVTKSFNRGEC

SEQ ID NO: 521 - protein, 219 aa, Artificial Sequence
  F846C.1B2 light chain peptide sequence
NIWLTQSPSSLAVSAGEMVTMTCKSSQSVLYSSNQKNYLAWYQQKPGQSPKLLIYWASTRESGVPDRFTGSGSGTDFSLTISSVQAEDLAVYYCHQYLSSLTFGAGTKLELKRTVAAPSVFIFPPSDEQLKSGTASVVCLLNNFYPREAKVQWKVDNALQSGNSQESVTEQDSKDSTYSLSSTLTLSKADYEKHKVYACEVTHQGLSSPVTKSFNRGEC

SEQ ID NO: 522 - protein, 219 aa, Artificial Sequence
  F846C.1F5/F846C.2H3 light chain peptide sequence
NIMMTQSPSSLAVSAGEKVTMSCKSSQSVLYSSNQKNYLAWYQQKPGQSPKLLIYWASTRESGVPDRFTGSGSGTDFTLTISSVQPEDLAVYYCHQYLSSLTFGAGTKLELKRTVAAPSVFIFPPSDEQLKSGTASVVCLLNNFYPREAKVQWKVDNALQSGNSQESVTEQDSKDSTYSLSSTLTLSKADYEKHKVYACEVTHQGLSSPVTKSFNRGEC

SEQ ID NO: 523 - protein, 219 aa, Artificial Sequence
  F846C.1H12 light chain peptide sequence
NIMMTQSPSSLAVSAGQKVTMSCKSSQSVLYSSSQKNYLAWYQQKPGQSPKLLIYWASTRESGVPDRFSGSGSGTDFTLTISSVQPEDLAVYYCHQYLSSLTFGAGTKLELKRTVAAPSVFIFPPSDEQLKSGTASVVCLLNNFYPREAKVQWKVDNALQSGNSQESVTEQDSKDSTYSLSSTLTLSKADYEKHKVYACEVTHQGLSSPVTKSFNRGEC

SEQ ID NO: 524 - protein, 219 aa, Artificial Sequence
  F846C.1H5 light chain peptide sequence
DVVMTQTPLSLPVSLGDQASISCRSSQSLVHNSGNTYLHWYLQRPGQSPNLLIYKVSNRFSGVPDRFSGSGSGTDFTLKISRVAAEDLGVYFCSQSTHVPPTFGGGTKLEIKRTVAAPSVFIFPPSDEQLKSGTASVVCLLNNFYPREAKVQWKVDNALQSGNSQESVTEQDSKDSTYSLSSTLTLSKADYEKHKVYACEVTHQGLSSPVTKSFNRGEC

SEQ ID NO: 525 - protein, 216 aa, Artificial Sequence
  F846TC.14A2 light chain peptide sequence
QAVVTQESALTTSPGETVTLTCRSSTGAVTTSNYANWVQEKPDHLFTGLIGGINNRVPGVPARFSGSLIGDKAALTITGAQTEDEAIYFCALWYSNHWVFGGGTKLTVLRTVAAPSVFIFPPSDEQLKSGTASVVCLLNNFYPREAKVQWKVDNALQSGNSQESVTEQDSKDSTYSLSSTLTLSKADYEKHKVYACEVTHQGLSSPVTKSFNRGEC

SEQ ID NO: 526 - protein, 219 aa, Artificial Sequence
  F846TC.14E4 light chain peptide sequence
DIVMTQAAFSNPVTLGTSASISCRSSKSLLHTNGITFLYWYLQKPGQSPQPLIYQMSNLASGVPDRFSSSGSGTDFTLRISRVEAEDVGVYYCAQNLELPWTFGGGTKLEINRTVAAPSVFIFPPSDEQLKSGTASVVCLLNNFYPREAKVQWKVDNALQSGNSQESVTEQDSKDSTYSLSSTLTLSKADYEKHKVYACEVTHQGLSSPVTKSFNRGEC

SEQ ID NO: 527 - protein, 219 aa, Artificial Sequence
  F846TC.16B5 light chain peptide sequence
NIMMTQSPSSLAVSAGEKVTMSCKSSQSVLYSSNQKNYLAWYQQKPGQSPKLLIYWASTRESGVPDRFTGSGSGTDFTLTISSVQAEDLAVYYCHQYLSSLTFGAGTKLELKRTVAAPSVFIFPPSDEQLKSGTASVVCLLNNFYPREAKVQWKVDNALQSGNSQESVTEQDSKDSTYSLSSTLTLSKADYEKHKVYACEVTHQGLSSPVTKSFNRGEC

SEQ ID NO: 528 - protein, 220 aa, Artificial Sequence
  F846TC.7F10 light chain peptide sequence
DIVMTQSPSSLAMSVGQKVTMSCKSSQSLLNSSNQKNYLAWYQQKPGQSPKLLVYFASTRESGVPDRFIGSGSGTDFTLTISSVQAEDLADYFCQQHYSTPYTFGGGAKLEIKRTVAAPSVFIFPPSDEQLKSGTASVVCLLNNFYPREAKVQWKVDNALQSGNSQESVTEQDSKDSTYSLSSTLTLSKADYEKHKVYACEVTHQGLSSPVTKSFNRGEC

SEQ ID NO: 529 - protein, 214 aa, Artificial Sequence
  F847C.10B9 light chain peptide sequence
DIRMTQSPSSLSASLGDTITITCHASQNINVWLSWYQQKPGNIPKLLIYKASNLHTGVPSRFSGSGSGTGFTLTISSLQPEDIATYYCQQGQSYPYTFGGGTKLELKRTVAAPSVFIFPPSDEQLKSGTASVVCLLNNFYPREAKVQWKVDNALQSGNSQESVTEQDSKDSTYSLSSTLTLSKADYEKHKVYACEVTHQGLSSPVTKSFNRGEC

SEQ ID NO: 530 - protein, 214 aa, Artificial Sequence
  F847C.11B1 light chain peptide sequence
EIVLTQSPASLSVTTGEKVTIRCITSIDIDDDMNWYQQKPGEPPKLLISEGNTLRPGVPSRFSSSGYGTDFVFTIENTLSEDVADYYCLQSDNKPLTFGAGTKLELKRTVAAPSVFIFPPSDEQLKSGTASVVCLLNNFYPREAKVQWKVDNALQSGNSQESVTEQDSKDSTYSLSSTLTLSKADYEKHKVYACEVTHQGLSSPVTKSFNRGEC

SEQ ID NO: 531 - protein, 214 aa, Artificial Sequence
  F847C.12F12 light chain peptide sequence
DIQVIQSPSSLSASLGDTITITCHASQNINVWLSWYQQKPGNIPKLLIYKASNLHTGVPSRFSGSGSGTGFTLTISSLQPEDIATYYCQQGQSYPYTFGGGTKLELKRTVAAPSVFIFPPSDEQLKSGTASVVCLLNNFYPREAKVQWKVDNALQSGNSQESVTEQDSKDSTYSLSSTLTLSKADYEKHKVYACEVTHQGLSSPVTKSFNRGEC

SEQ ID NO: 532 - protein, 214 aa, Artificial Sequence
  F847C.26F5 light chain peptide sequence
EIKMNQSPSSLSASLGDTITITCHASQNINVWLSWYQQKPGNIPKLLIYKASNLHTGVPSRFSGSGSGTGFTLTISSLQPEDIATYYCQQGQSYPYTFGGGTKLELKRTVAAPSVFIFPPSDEQLKSGTASVVCLLNNFYPREAKVQWKVDNALQSGNSQESVTEQDSKDSTYSLSSTLTLSKADYEKHKVYACEVTHQGLSSPVTKSFNRGEC

SEQ ID NO: 533 - protein, 216 aa, Artificial Sequence
  F847C.4B10/847.14H4 light chain peptide sequence
QAVVTQESALTTSPGETVTLTCRSSTGAVTTSNYANWVQEKPDHLFTGLIGGTNNRAPGVPARFSGSLIGDKAALTITGAQTEDEAIYFCALWYSNHLVFGGGTKLTVLRTVAAPSVFIFPPSDEQLKSGTASVVCLLNNFYPREAKVQWKVDNALQSGNSQESVTEQDSKDSTYSLSSTLTLSKADYEKHKVYACEVTHQGLSSPVTKSFNRGEC

SEQ ID NO: 534 - protein, 219 aa, Artificial Sequence
  F849C.8D10 light chain peptide sequence
DVLMTQTPLSLPVSLGDQASISCRSSQDIVHSSGNTYLEWYLQKPGQSLKLLIYKVSNRFSGVPDRFSASGSGTDFTLKISRVEAEDLGVYYCFQGSHVPPTFGSGTKLEIKRTVAAPSVFIFPPSDEQLKSGTASVVCLLNNFYPREAKVQWKVDNALQSGNSQESVTEQDSKDSTYSLSSTLTLSKADYEKHKVYACEVTHQGLSSPVTKSFNRGEC

SEQ ID NO: 535 - protein, 219 aa, Artificial Sequence
  F849C.8H3 light chain peptide sequence
DIGMRQAAFSNPVTLGTSASISCRSSKSLLYSNGITYLYWFLQKPGQSPQLLIYQMSNLASGVPDRFSSSGSGTDFTLRISRVEADDVGVYYCAQNLELPWTFGGGTKLEIKRTVAAPSVFIFPPSDEQLKSGTASVVCLLNNFYPREAKVQWKVDNALQSGNSQESVTEQDSKDSTYSLSSTLTLSKADYEKHKVYACEVTHQGLSSPVTKSFNRGEC

SEQ ID NO: 536 - protein, 218 aa, Artificial Sequence
  846.2B11 light chain peptide sequence
DIVLTQSPASLGVSLGQRATISCRASKSVSTSGYSYMHWYQQKPGQPPKLLIYLASILESGVPARFSGSGSGTDFTLNIHPVEEEDAAIYYCQHSRELPLTFGAGTKLELKRTVAAPSVFIFPPSDEQLKSGTASVVCLLNNFYPREAKVQWKVDNALQSGNSQESVTEQDSKDSTYSLSSTLTLSKADYEKHKVYACEVTHQGLSSPVTKSFNRGEC

SEQ ID NO: 537 - protein, 218 aa, Artificial Sequence
  846.4D5 light chain peptide sequence
NIVLTQSPASLAVSLGQRATISCRASESVDSYGNSFMHWYQQKPGQPPKLLIYLASNLESGVPARFSGSGSRTDFTLTIDPVEADDAATYYCQQNNEDPWTFGGGTKLEIKRTVAAPSVFIFPPSDEQLKSGTASVVCLLNNFYPREAKVQWKVDNALQSGNSQESVTEQDSKDSTYSLSSTLTLSKADYEKHKVYACEVTHQGLSSPVTKSFNRGEC

SEQ ID NO: 538 - protein, 219 aa, Artificial Sequence
  846T.1H2 light chain peptide sequence
DVVMTQTPLTLSVTIGQPASISCKSSQSLLYSNGKTYLNWLLQRPGQSPKRLIYLVSKLDSGVPDRFTGSGSGTDFTLKISRVEAEDLGVYYCVQGTHFPQTFGGGTKLEIKRTVAAPSVFIFPPSDEQLKSGTASVVCLLNNFYPREAKVQWKVDNALQSGNSQESVTEQDSKDSTYSLSSTLTLSKADYEKHKVYACEVTHQGLSSPVTKSFNRGEC

SEQ ID NO: 539 - DNA, 348 bp, Artificial Sequence
  TB001 VH DNA sequence
caggtgcagctggtgcagtccggctccgagctgaaaaaacccggcgcctccgtgaaagtgtcctgcaaagcctccggctacacattcacaaactacggcatgaactgggtgaggcaggcccccggccagggcctgaaatggatgggctggatcaacacaaacacaggcgagcccacatacgtggaggagttcacaggcaggttcgtgttctccctggagacatccgtgtccacagcctacctgcagatctcctccctgaaagccgaggacacagccgtgtacttctgcgccccctacgacaacttcttcgcctactggggccagggcacaacagtgacagtgtcctcc

SEQ ID NO: 540 - DNA, 357 bp, Artificial Sequence
  TB006  VH DNA sequence
cagattcaattggttcagagcggctcagaactgaaaaagcctggagccagcgttaaagtgagctgtaaagccagtggatacacattcaccacttacgtcatgtcctgggttagacaggcccctggacaggggctggaatggatgggctggataaacactcactctggagtgcccacatacgccgacgactttacaggcaggttcgtgttttccctagatactagtgtgaatactgcatacttgcaaatctcttctctgaaagcagaggataccgccgtgtacttttgcacccgcgatgggaatgatggggatgccatggacaactggggccaggggacgactgtgacagtgtcttca

SEQ ID NO: 541 - DNA, 366 bp, Artificial Sequence
  12G5.D7 VH DNA sequence
caggtgcagctgaagcagtctggggctgagctggtgaggcctggggcttcagtgaagctgtcctgcaaggcttctggctacactttcactgactactatataaactgggtgaagcagaggcctggacagggacttgagtggattgcaaggatttatcctggaactggtaatactgactacaatgagaagttcaagggcagggccacactgactgcagaaaactcctccagcactgcctacatgcagctcagcagtctgacatctgaggactctgctgtctatttctgtgcaagatttgcgtattactacggtagtggagggtactttgactactggggccacggcaccactctcacagtctcctca

SEQ ID NO: 542 - DNA, 357 bp, Artificial Sequence
  13A12.2E5 VH DNA sequence
cagatccagttggtacagtctggacctgagctgaagaagcctggagagacagtcaagatctcctgcaagacttctgggtataaattcaaaacctatgtgatgagctgggtgaaacaggctccaggaaaggctttaaagtggatgggctggataaacacctactctggagtgccaacatatgctgatgacttcaagggacgatttgccttctctttggaaacctctgccagcactgcctatttggagatcatcaacctcaaaaatgaggacacggctacatatttctgtgcaagagatggtaactacggggatcctatggactactggggtcaaggaacctcagtcaccgtctcctca

SEQ ID NO: 543 - DNA, 351 bp, Artificial Sequence
  14H10.2C9 VH DNA sequence
cagatccagttggtacagtctggacctgagctgaagaagcctggagagacagtcaagatctcctgcaaggcttctgggtataccttcacaacctatggaatgggctgggtgaaacaggctccaggaaaggatttaaagtggatgggctggataaacacctactctggagtgccaacatatgctgatgacttcaagggacggtttgccttctctttggaaacctctgccagcactgcctatttgcagatcagcaacctcaaaaatgaagacacggctacatatttctgttcaaccccttatgaatacgacggggcttactggggccaggggactctggtcactgtctctgca

SEQ ID NO: 544 - DNA, 339 bp, Artificial Sequence
  15F10.2D6 VH DNA sequence
gaagtacagctggtggagtctgggggaggcttagtgaagcctggagggtccctgaaactctcctgtgcagcctctggattcgctttcagttcctatgccatgtcttgggttcgccagactccggaaaagaggctggagtgggtcgcaaccattagtgatggtggtgtttacacctactatacagaccatgtaaagggccgattcaccatctccagagacaatgccgaggacaacctgtacctgcaaatgagccatctgaagtctgaggacacagccatgtattattgtgtgagagatgggggctactggggccaaggcaccactctcacagtctcctca

SEQ ID NO: 545 - DNA, 348 bp, Artificial Sequence
  19B5.2E6 VH DNA sequence
cagatccaacttgttcagagcgggcctgaattgaagaaaccaggcgagactgtaaagatctcctgtaaggccagtggctatacattcaccacctacgcaatgagctgggtcaagcaggcacccggaaagggtctgaagtggatgggttggataaatacatactcaggcgtcccaacctacgctgatgatttgaaggggcgctttgccttttctcttgaaacctcagcatcaaccgcctacttgcagataaataacctcaaaaatgaagacaccgctacctatttctgcgcaagggggccttatgctatggactactggggccagggcacctctgtgactgtaagttct

SEQ ID NO: 546 - DNA, 345 bp, Artificial Sequence
  20D11.2C6 VH DNA sequence
gaggtccagctgcaacaatctggacctgaactggtgaagcctggggcttcagtgaagatatcctgtaaggcttctggatacacgttcactgacttctacataaactgggtgaagcagagccatggaaagagccttgagtggattggagatattaatcctaagaatggtggtattaactacaacccgaagttcaagatcaaggccacattgactgtagacaagtcctccagcacatcctacatggacctccgcggcctgacatctgaggactctgcagtctattactgcacctcaggctacggatttccttactggggccaagggactctggtcactgtctctgca

SEQ ID NO: 547 - DNA, 348 bp, Artificial Sequence
  20H5.A3 VH DNA sequence
cagatccagttggtacagtctggacctgagctgaagaagcctggagagtcagtcaagatctcctgcaaggcttctggttatgccttcacaacctatggaatgagctgggtgcaacaggctccaggaaagggtttaaagtggatgggctgggtaaacacctactctggagtgccaacatgtgctgatgacttcaagggacggtttgccttctctttggaaacctctgccagcactgcctatttgcagatcaacaacctcagaaatgaggacacggctacatatttctgtgcaagagggccctatgctatggactactggggtcaaggaacctcagtcaccgtctcctca

SEQ ID NO: 548 - DNA, 348 bp, Artificial Sequence
  23H9.2E4 VH DNA sequence
cagatccagttggtacagtctggacctgagctgaagaagcctggagagacagtcaagatctcctgcaaggcttctgggtataccttcacaacctatgcaatgagctgggtgaaacaggctccaggaaagggtttaaagtggatgggctggataaacacctactctggagtgccaacatatgctgatgacctcaagggacggtttgccttctctttggaaacctctgccagcactgcctatttgcagatcaacaacctcaaaaatgaggacacggctacatatttctgtgcaagagggccctatgctatggactactggggtcaaggaacctcagtcaccgtctcctca

SEQ ID NO: 549 - DNA, 360 bp, Artificial Sequence
  2D10-VH0-VL0 VH DNA sequence
cagtttcagcttcaacagtctggtcctgaactcgtaaagcctggggccagtgtaaaaatatcctgtaaggcatcaggatacactttcaccgattactacatcaactgggtaaagcagcgacctggtcagggactggagtggattggctggatctaccccggatcaaatgacaccaaatacaatgagaagttcaagggcaaagctacccttacagtcgatacctcctcctccaccgcatatatgcaacttgggtcactgacttcagaggattctgcagtctatttttgcgctaattactttggatgcagcggctggtttttcgacgtgtggggaaccggaaccacagtgacagtatcctct

SEQ ID NO: 550 - DNA, 357 bp, Artificial Sequence
  3B11.2G2 VH DNA sequence
cagatccagttggtacagtctggacctgagctgaagaagcctggagagacagtcaagatctcctgcaagacttctgggtataaattcaaaacctatgtaatgagctgggtgaaacaggctccaggaaaggctttaaagtggatgggctggataaacacctactctggagtgccaacatatgctgatgacttcaagggacggtttgccttctctttggaaacctctgccagcactgcctatttggagatcatcaacctcaaaaatgaggacacggctacatatttctgtgcaagagatggtaattacggggatcctatggactactggggtcaaggaacctcagtcaccgtctcctca

SEQ ID NO: 551 - DNA, 339 bp, Artificial Sequence
  7D8.2D8 VH DNA sequence
gaagtgcagctggtggagtctgggggaggcttagtgaagcctggagggtccctgaaactctcctgtgcagcctctggattcactttcagtagctatgccatgtcttgggttcgccagactccggaaaagaggctggagtgggtcgcaaccatcagtgatggtggtatttacacctactatccagacaatgtaaagggccgattcaccatttccagagacaatgccaagaacaacctgttcctgcaaatgagccatctgaagtctgaggatacagccatgtattactgtgtaagagatgggggctactggggccaaggcaccactctcacagtctcctca

SEQ ID NO: 552 - DNA, 348 bp, Artificial Sequence
  mIMT001 VH DNA sequence
cagatccaacttgtgcagtcaggtccagaattgaagaagcctggtgagaccgtcaagatttcctgtaaggcctctggttatacttttaccaactatggcatgaattgggtcaagcaggcacctgggaagggtttgaaatggatggggtggataaataccaacacaggggaaccaacttacgttgaagagtttaagggtcgttttgcattcagtcttgagacttctgcaagcacagcttacctccaaattaacaatctcaaaaatgaagatactgctacatatttctgtgctccttatgataattttttcgcctactggggacagggaactctggtcaccgtctcagca

SEQ ID NO: 553 - DNA, 348 bp, Artificial Sequence
  4A11.2B5 VH DNA sequence
caggtacaacttcagcagagcggtccagaacttgtgaagcccggtgctagtgtcaaaatatcttgcaaagcaagtggttattccttcaccaactattacatacactgggtaaaacaacgtccagggcaaggactcgaatggattggttggatctaccccggcagcggcaacactaactacaacgagaagtttaaaggcaaagctactctcacagcagacacttctagcagtacaacaaatatgcagttgtcctctctgacttccgaagacagcgccgtctattactgttctactgcacccggaggttttgacgtctggggttccggcaccacagttaccgttagttcc

SEQ ID NO: 554 - DNA, 348 bp, Artificial Sequence
  4A11.H1L1 VH DNA sequence
caggtgcagctggtgcaatcaggagccgaagttaagaagcctggcgccagcgtcaaggtctcatgtaaagcctccggttacagtttcaccaactactatatgcactgggttaggcaagcaccaggccaggggcttgagtggatgggatggatctatccagggagcggtaacaccaattacaatgagaagtttcaagggcgcgtaaccatgacagcagataccagtataagcaccgcctatatggaactctctcggttgagatccgatgataccgctgtttattactgctctaccgcacctggtggtttcgacgtttggggccaaggtactacagtgaccgtatcatca

SEQ ID NO: 555 - DNA, 348 bp, Artificial Sequence
  4A11.H4L2 VH DNA sequence
caggtgcaactggtccagtctggggccgaggtcaaaaagcctggagcctccgtcaaagtgtcatgtaaagcctcagggtatagtttcaccaactactatatacattgggtcagacaagccccaggccagcgtcttgagtggatgggatggatttatcccggatcagggaatacaaactataacgagaaatttcaaggcagagttactctcactgccgatacctctgcaagtactacctatatggagctctccagtctcagaagcgaagacacagcagtatattactgtagcaccgccccaggcgggtttgacgtgtggggccaaggcactactgtaaccgttagctca

SEQ ID NO: 556 - DNA, 357 bp, Artificial Sequence
  4G2.2G6 VH DNA sequence
caaatacagctcgtgcagtctggtcccgatttgaagaagcctggagaaaccgtaaagataagctgtaaggctagtggttacactttcacaacatacgttatgtcatgggttaaacaggctcctggaaaagaccttaaatggatgggatggattaacacccatagcggtgtcccaacttacgctgacgattttaagggacgatttgacttttctctcgaaacttctgccaacacagcttttttgcagatcaacaatctcaagaatgaagacaccgcaacctatttctgcactcgagatgggaacgacggggatgcaatggataactggggacaaggcacatcagttaccgtgagctct

SEQ ID NO: 557 - DNA, 360 bp, Artificial Sequence
  6B3.2D3 VH DNA sequence
caggtgcagctgaagcagtcaggacctggcctagtgcagccctcacagagcctgtccatcacctgcacagtctctggtttctcattaactagttatggtgtacactgggttcgccagcctccaggaaagggtctggagtggctgggagtgatatggagtggtggaagcacagactataatgctgctttcatatccagactgagcatcagtaaggacaactccaagagccaagttttctttaaaatgaacagtctgcaagctgatgacactgccatatactactgtgccaaagggccttatgattacgacttaggctggtttgcttactggggccaagggactctggtcactgtctctgca

SEQ ID NO: 558 - DNA, 348 bp, Artificial Sequence
  6H6.2D6 VH DNA sequence
cagatccagctggtgcagtccggccccgagctgaagaagcccggcgagactgtgaagatctcctgcaaggcctccggctacaccttcaccacctacggcatgtcctgggtgaagcaggcccccggcaagggcctgaagtggatggcctggatcaacacctactccggcgtgcccacctacgccgacgacttcaagggcaggttcgccttctccctggagacttccgcctccaccgcctacctgcagatcaacaacctgaccaacgaggacaccgccacctacttctgcgccaggggcccctacgccatggactactggggccagggcacctccgtgaccgtgtcctcc

SEQ ID NO: 559 - DNA, 345 bp, Artificial Sequence
  9H2.2H10 VH DNA sequence
caggtccagctgcagcagcctggggctgaactggtggggcctgggtcttcagtgaagctgtcctgcaaggcttctggctacaccttcaccaactactggatacattgggtgaagcagaggcctctacaaggccttgaatggattggtaacattgacccttctgatagtgaaactcactacaatcaaaagttcaaggacaaggccacattgactgtagacaaatcctccagcacagcctacatgcaactcagcagcctgacatctgaggactctgcggtctattactgtgcaagacatggttactacgactactggggccaaggcaccactctcacagtctcctca

SEQ ID NO: 560 - DNA, 357 bp, Artificial Sequence
  13G4.2F8 VH DNA sequence
caggtccagctgcagcagcctggggctgagctggtaaagcctggggcttcagtgaagttgtcctgcaaggcttctggctacactttcaccagctactggatgcactgggtgaagcagaggcctggacaaggccttgagtggattggaatgattcatcctaacagtggtagtactgactacaatgagaagttcaagaacaaggccacactgaatgtagacaaatcctccagtacagcctacatacaactcagcagcctgacatctgaggactctgcggtctattactgtacaagatgggggatttattactacgcgagggactactggggccaaggcaccactctcacagtctcctca

SEQ ID NO: 561 - DNA, 351 bp, Artificial Sequence
  13H12.2F8 VH DNA sequence
cagatccagctggtccaatcaggacccgaactgaaaaaaccaggcgagacagtcaaaatcagctgtaaggcctcaggctacactttcacaacctacgggatgtcatgggtaaagcaagctcctggcaaggggctgaaatggatgggttggatcaacacatactctggagtgcccacctacgctgacgactttaagggtagattcgcatttagcctggaaacaagtgccagtacagcctacctccagataaacaacttgaaaaacgaggataccgcaacctatttttgcgccgtcccctacgagtacgacggtgcctattggggtcagggtacactcgtaacagtttccgcc

SEQ ID NO: 562 - DNA, 345 bp, Artificial Sequence
  15G7.2A7 VH DNA sequence
gaggtccagctgcaacaatctggacctgagctggtgaagcctggggcttcagtgaagatatcctgtaaggcttctggatacacgttcactgactactacatgaactgggtgaagcagagccatggaaagagccttgagtggattggagatattaatcctaacaatggtggtactaactacaaccagaagttcaagggcaaggccacattgactgtagacaagtcctccagcacagcctacatggagctccgcagcctgacatctgaggactctgcagtctattactgcacctcaggctacgggtttccttactggggccaggggactctggtcactgtctctgca

SEQ ID NO: 563 - DNA, 351 bp, Artificial Sequence
  19D9.2E5 VH DNA sequence
cagatccagttggtacagtctggacctgagctgaagaagcctggagagacagtcaagatctcctgcaaggcttctggatataccttcacaacctatggaatgggctgggtgaaacaggctccaggaaagggtttgaagtggatgggctggataaacacctactctggcgtgccaacatatgctgatgacttcaagggacggtttgccttctctttggaaacctctaccagcactgcctatttgcagatcaacaacctcaaaaatgaggacatggctacatatttctgtgcaaccccttatgaatacgacggggcttactggggccaagggactctggtcactgtctctgca

SEQ ID NO: 564 - DNA, 336 bp, Artificial Sequence
  23B10.2B12 VH DNA sequence
caggtccagctgcagcagtctggacctgaactggtgaagcctggggattctgtgaagatatcctgcaaggctgctggctacaccttcagtgactattatataaactgggtgaagcagaggcctggacagggacttgagtggattggatggatttatcctgtaagcgttaatactaagtacaatgagaagttcaagggcaaggccacattgactgtagacacatcctccagcacagcctacatgcagctcagcagcctgacctctgaggactctggggtctatttctgtgcctaccttgattattggggccaagggactctggtcactgtctctgca

SEQ ID NO: 565 - DNA, 360 bp, Artificial Sequence
  24D12.2H9 VH DNA sequence
caggtgcagctgaagcagtcaggacctggcctagtgcagccctcacagagcctgtccatcacctgcacagtctctggtttctcattaactagctatggtgtacactgggttcgccaggctccaggaaagggtctggaatggctgggagtgatatggagtggtggaagcacagactataatgctgctttcatgtccagactgagcatcagcaaggacaactccaagagccaagttttctttaaaatgaacagtctgcaagctgatgacactgccatatactactgtgccaaaagccctgatggttacgacgtcgcctggtttggttactggggccaagggactctggtcactgtctctgca

SEQ ID NO: 566 - DNA, 366 bp, Artificial Sequence
  F846C.1B2 VH DNA sequence
cagatccagttggtgcagtctggacctgagctgaagaagcctggagagacagtcaagatctcctgcaaggcttctgggtataccttcacaaactatggaatgaattgggtgaagcaggctccaggaaagggtttaaagtggatgggctggataaacacctacactggagagccatcatatgctgatgacttcaagggacggtttgccttctctttggaaacctctgccagcactgcctatttgcagatcaacaacctcaaaaatgaggacatggctacatatttctgtgcaagatgggggggttacgctggggattactatgctatggacttctggggtcaaggaacctcagtcaccgtctcctca

SEQ ID NO: 567 - DNA, 366 bp, Artificial Sequence
  F846C.1F5 VH DNA sequence
cagatccagttggtgcagtctggacctgagctgaagaagcctggagagacagtcaagatctcctgcaaggcttctgggtataccttcacaaactatggaatgaactgggtgaagcaggctccaggaaagggtttaaagtggatgggctggataaacacctacactggagagccatcatatgctgatgacttcaagggacggtttgccttctctttggaaacctctgccagcactgcctatttgcagatcaacaacctcaaaaatgaggacatggctacatatttctgtgcaagatgggggggttacgatggggattactatgctatggactactggggtcaaggaacctcagtcaccgtctcctca

SEQ ID NO: 568 - DNA, 366 bp, Artificial Sequence
  F846C.1H12 VH DNA sequence
cagatccagttggtgcagtctggacctgagctgaagaagcctggagagacagtcaagatctcctgcaaggcttctgggtataccttcacaaactttggaatgaactgggtgaagcaggctccaggaaagggtttaaagtggatgggctggataaacacctacactggagagccatcatatgctgatgacttcaagggacggtttgccttctctttggaaacctctgccagcactgcctatttgcagatcaacaacctcaaaaatgaggacattgctacatatttctgtgcaagatgggggggttacgctggggattactatgctatggactactggggtcaaggaacctcagtcaccgtctcctca

SEQ ID NO: 569 - DNA, 348 bp, Artificial Sequence
  F846C.1H5 VH DNA sequence
gaggtccagctgttggagtctgggggaggcttagtgaagcctggagggtccctgaaactctcctgtgcagcctctggattcactttcagcagctatgccatgtcttgggttcgccagactccagagaagaggctggagtgggtcgcatccattagtagtggtggtgacacctactatccagacagtgtgaagggccgattcaccatctctagagataatgccaggaacatcctgtacctgcaaatgagcagtctgaggtctgaggacacggccatgtattactgtgcaagttatggtaactccctctttgactactggggccaaggcaccactctcacagtctcctca

SEQ ID NO: 570 - DNA, 366 bp, Artificial Sequence; identical to SEQ ID NO: 567
  F846C.2H3 VH DNA sequence

SEQ ID NO: 571 - DNA, 342 bp, Artificial Sequence
  F846TC.14A2 VH DNA sequence
cagatccagttggtgcagtctggacctgagctgaagaagcctggagagacagtcaagatctcctgcaaggcttctgggtataccttcacaaactatggaatgaactgggtgaagcaggctccaggaaagggtttaaagtggatgggctggataaacacctacactggagagccaacatatgctggtgacctcaagggacggtttgccttctctttggaaacctctgccagcactgcctatttgcagatcaacaacctcaaaaatgaggacacggctacatatttctgtgtaagatatactatggactactggggtcaaggaacctcagtcaccgtctcctca

SEQ ID NO: 572 - DNA, 372 bp, Artificial Sequence
  F846TC.14E4 VH DNA sequence
caggttactctgaaagagtctggccctgggatattgcagccctcccagaccctcagtctgacttgttctttctctgggttttcactgagcacttctggtatgggtgtaggctggattcgtcagccttcagggaagggtctggagtggctggcacacatttggtgggatgatgataagtactataacacagccctgaagagcgggctcacaatctccaaggatgcctccaaaaaccaggtcttcctcaagatcgccagtatggacactgcagatactgccacatactactgtgctcgaaacctctatgatggttcctacgggtactatgctatggactactggggtcaaggaacctcagtcaccgtctcctca

SEQ ID NO: 573 - DNA, 366 bp, Artificial Sequence
  F846TC.16B5 VH DNA sequence
cagatccagttggtgcagtctggacctgagctgaagaagcctggagagacagtcaagatctcctgcaaggcttctgggtataccttcacaaactatggaatgaactgggtgaagcaggctccaggaaagggtttaaagtggatgggctggataaacacctacactggagagccagcatatgctgatgacttcaagggacggtttgccttctctttggaaacctctgccagcactgcctatttgcagatcaacaacctcaaaaatgaggacatggctacatatttctgtgcaagatgggggggttacgatggggattactatgctatggactactggggtcaaggaacctcagtcaccgtctcctca

SEQ ID NO: 574 - DNA, 369 bp, Artificial Sequence
  F846TC.7F10 VH DNA sequence
gaagtgcagctggtggagtctgggggagacttagtgaagcctggagggtccctgaaactctcctgtgcagcctctggattcactttcagtaactatggcttgtcttggattcgccagactccagacaagaggctggagtgggtcgcaaccattagtagtggtggtagttacacctactatcctgacagtgtgaaggggcgattcaccatctccagagacagtgccaagaacaccctgtacctgcaaatgagcagtctgaagtctgaggacacagccatgtattactgtgcaagacatgcgcattactacggtgttagcccgtactactttgactactggggccaaggcacctgtctcacagtctcctca

SEQ ID NO: 575 - DNA, 357 bp, Artificial Sequence
  F847C.10B9 VH DNA sequence
cagatccagttggtgcagtctggacctgaggtgaagaagcctggagagacagtcaagatctcctgcaaggcttctgggtatatcttcacaaactatggaatgaactgggtgaagcaggctccaggaaagggtttaaagtggatgggctggataaacacctacactggagagccaacatatactgatgacttcaagggacggtttgccttctctttggaaacctctgccagcactgcctatttgcagatcaacaacctcaaaaatgaggacacggctacatatttctgtgcaaagtttggtaactacgtgggagctatggactactggggtcaaggaacctcagtcaccgtctcctca

SEQ ID NO: 576 - DNA, 360 bp, Artificial Sequence
  F847C.11B1 VH DNA sequence
gaggtccagcttcagcagtctggacctgagctggtgaaacctggggcctcagtgaagatatcctgcaaggcttctggaaacacattcactgaccacaacatgcactgggtgaagcagagccatggaaagagccttgagtggattggatatatttatccttacaatggtggtactggctacaaccagaagttcaagagcaaggccacattgactgtagacaattcctccagcacagtctacatggagctccgcagcctgacatctgaggactctgcagtctattactgtgcaagaggggagtatgattacctggcctggtttgcttactggggccaagggactctggtcactgtctctgca

SEQ ID NO: 577 - DNA, 357 bp, Artificial Sequence
  F847C.12F12 VH DNA sequence
cagatccagttggtgcagtctggacctgagctgaagaagcctggagagacagtcaagatctcctgcaaggcttctgggtataccttcacaaactatggaatgaactgggtgaagcaggctccaggaaagggtttaaagtggatgggctggataaacacctacactggagagccaacatatgttgatgacttcaagggacggtttgccttctctttggaaacctctgccagcactgcctatttgcggatcaacaacctcaaaaatgaggacacggctacatatttctgtgcaaagtttggtaactacgtgggagctatggactactggggtcaaggaacctcagtcaccgtctcctca

SEQ ID NO: 578 - DNA, 357 bp, Artificial Sequence; identical to SEQ ID NO: 575
  F847C.26F5 VH DNA sequence

SEQ ID NO: 579 - DNA, 351 bp, Artificial Sequence
  F847C.4B10 VH DNA sequence
gaggtgcagcttgttgagactgggggaggcttagtgaagcctggagggtccctgaaactctcctgtgcagcctctggattcactttcagtagctatgccatgtcttgggttcgccagactccagagaagaggctggagtgggtcgcatccattagtagtggtggtagcacctactatccagacagtgtgaagggccgattcaccatctccagagataatgccaggaacatcctgtacctgcaaatgagcagtctgaggtctgaggacacggccatgtattactgtacaaggtttactacggtagtagagatggactactggggtcaaggaacctcagtcaccgtctcctca

SEQ ID NO: 580 - DNA, 336 bp, Artificial Sequence
  F849C.8D10 VH DNA sequence
caggtccaactgcagcagactggtgctgagcttgtgaagcctggggcctcagtgaagctgtcctgcaaggcttctggctatactttcaccagctactggataaactgggtgaagcagaggcctggacaaggccttgagtggattggaaacatttatcctggtagtagtagtatttactacagtgagaagttcaagagtaaggccacactgactgtagacacatcctccagcacagcctacatgcagctcagcagcctgacatctgacgactctgcggtctattattgtgcaagatggggctactggggccaaggcaccactctcacagtctcctca

SEQ ID NO: 581 - DNA, 363 bp, Artificial Sequence
  F849C.8H3 VH DNA sequence
caggttactctgaaagagtctggccctgggatattgcagccctcccagaccctcagtctgacttgttctttctctgggttttcactgagcacttttggtatgggtgtaggctggattcgtcagccttcagggaagggtctggagtggctggcacacatttggtgggatgatgataaacactataacccagccctgaagagccggctcacaatctccaaggatacctccaaaaaccaggtcttcctcaggatcgccaatgtggacactgcagataatgccacatattactgtgctcgaatcgactatggtgactacgtcgggtttgcttattggggccaagggactctggtcactgtctctgca

SEQ ID NO: 582 - DNA, 354 bp, Artificial Sequence
  846.2B11 VH DNA sequence
caggtccagctacagcagtctggacctgagctggtgaggcctggggctttagtgaagatttcctgcaaggcttctggttacaccttcacaagctacgatataaactgggtgaagcagaggcctggacagggacttgagtggattggatggatttatcctggagatggtagtactaaatataatgagaaattcaagggcaaggccacactgactgcagacaaatcctccagcacagcctacatgcagctcagcagcctgacttctgagaactctgcagtctatttctgtgcaagagaggcggcttctaatgctatggactactggggtcaaggaacctcagtcaccgtctcctca

SEQ ID NO: 583 - DNA, 366 bp, Artificial Sequence
  846.4D5 VH DNA sequence
gaagtgaagcttgaggagtctggaggaggcttggtgcaacctggaggatccatgaaactctcctgtgttgcctctggattcactttcagtaactactggatgaactgggtccgccagtctccagagaaggggcttgagtgggttgctgaaattagattgaaatctaataattatgcaacacattatgcggagtctgtgaaagggaggttcaccatctcaagagatgattccaaaagtagtgtctacctgcaaatgaacaacttaagagctgaagacactggcatttattactgtaccaggcactacggctttccctactggtacttcgatgtctggggcgcagggaccacggtcaccgtctcctca

SEQ ID NO: 584 - DNA, 354 bp, Artificial Sequence
  846T.1H2 VH DNA sequence
cagatccagttggtgcagtctggacctgagctgaagaagcctggagagacagtcaagatctcctgcaaggcttctgggtataccttcacaaactatggaatgaactgggtgaagcaggctccaggaaagggtttaaagtggatgggctggataaacaccaacactggagagccaacatatgctgaagagttcaagggacggtttgccttctctttggaaacctctgccagcactgcctatttgcagatcaacaacctcaaaaatgaggacacggctacatatttctgtgcaaccggggggggtaactgggactttgactactggggccaaggcaccactctcacagtctcctca

SEQ ID NO: 585 - DNA, 342 bp, Artificial Sequence
  847.14H4 VH DNA sequence
cagatccagttggtgcagtctggacctgaactgacgaagcctggagagacagtcaagatctcctgtaaggcttctggctataccttcacagactatggaatgaactgggtgaggcaggctccaggagagactttaaagtggatgggctggataaacacctacactggagagccaacatatgctgatgacttcaaggggcggtttgccttctctttggaatcctctgccagcactgcctatttgcagatcaacaacctcaaaaatgaggacgtggctacatatttctgtgcaagataccctatggactactggggtcaaggaacctcagtcaccgtctcctca

SEQ ID NO: 586 - DNA, 366 bp, Artificial Sequence
  846.2D4 VH DNA sequence
gaagtgaagcttgaggagtctggaggaggcttggtgcaacctggaggatccatgaaactctcctgtgttgcctctggattcactttcagtaactactggatgaactgggtccgccagtctccagagaaggggcttgagtgggttgctgaacttagattgaaatctaataattatgcaacacattatgcggagtctgtgaaagggaggttcaccatctcaagagatgattccaaaagtagtgtctacctgcaaatgaacaacttaagagctgaagacactggcatttattactgtaccaggcactacggctttccctactggtacttcgatgtctggggcgcagggaccacggtcaccgtctcctca

SEQ ID NO: 587 - DNA, 354 bp, Artificial Sequence
  846.2F11 VH DNA sequence
gaggtccagctgcagcagtctggacctgagctggtgaagcctggggcttcagtgaagatgtcctgcaaggcttctggatacacattcactagctatgttatgcactgggtgaagcagaagcctgggcagggccttgagtggattggatatattaatccttacaatgatggtactaagtacaatgagaagttcaaaggcaaggccacactgacttcagacaaatcctccagcacagcctacatggagctcagcagcctgacctctgaggactctgcggtctattactgtgcaagattacttttttactatgctatggactactggggtcaaggaacctcagtcaccgtctcctca

SEQ ID NO: 588 - DNA, 354 bp, Artificial Sequence
  846T.10B1 VH DNA sequence
caggttcagctgcagcagtctggacctgagctggtgaggcctggggctttagtgaagatttcctgcaaggcttctggttacaccttcacaagctacgatataaactgggtgaagcagaggcctggacagggacttgagtggattggatggatttatcctggagatggtagtactaaatacaatgagaaattcaagggcaaggccacactgactgcagacaaatcctccagcacagtttacatgcagctcagcagcctgacttctgagaactctgcagtctatttctgtgctagagaggcggcttctaatgccatggactactggggtcaaggaacctcagtcaccgtctcctca

SEQ ID NO: 589 - DNA, 354 bp, Artificial Sequence
  846T.2E3 VH DNA sequence
caggtccagctgcagcagtctggacctgagctggtgaagcctggggctttagtgaagatatcctgcaaggcttctggttacaccttcacaagctacgatataaactgggtgaagcagaggcctggacagggacttgagtggattggatggatttatcctggagatggtagtactaagtacaatgagaaattcaagggcaaggccgcactgactgcagacaagtcctccagcacagcctacatgcagctcagcagcctgacttctgagaactctgcagtctatttctgtgcaagagaggcggcttctaatgctatggactactggggtcaaggaacctcagtcaccgtctcctca

SEQ ID NO: 590 - DNA, 354 bp, Artificial Sequence
  846T.4C9 VH DNA sequence
gaggtccagctgcagcagtctggacctgagctggtaaagcctggggcttcagtgaagatgtcctgcaaggcttctggatactcattcactaactatattatgcactgggtgaagcagaagcctgggcagggccttgagtggattggatatattaatccttacaatgatggtactaagtacaatgagaagttcaaaggcaaggccacactgacttcagacaaatcctccagcacagcctacatggagctcagcagcctgacctctgaggactctgcggtctattactgtgcaagattacttttttactatgctatggactactggggtcaaggaacctcagtcaccgtctcctca

SEQ ID NO: 591 - DNA, 354 bp, Artificial Sequence
  846T.4E11 VH DNA sequence
caggttcagctgcagcagtctggagctgaactggtaaagcctggggcttcagtgaagttgtcctgcaaggcttctggctacaccttcagaagctatgatataaactgggtgaggcagaggcctgaacagggacttgagtggattggatggatttttcctggagaaggtatttctaagtacaatgagaagttcaagggcaaggccacactgactacagacaaattgtccagcacagcctacatgcagctcagcagcctgacatctgaggactctgctgtctatttctgtgcaagagaggctacggctggggctatggactactggggtcaaggaacctcagtcaccgtctcctca

SEQ ID NO: 592 - DNA, 366 bp, Artificial Sequence
  846T.4F5 VH DNA sequence
gaggtgaagcttctcgagtctggaggaggcttggtgcaacctggaggatccatgaaactctcctgtgttgcctctggattcactttcagtaacttctggatgaactgggtccgccagtctccagagaaggggcttgagtgggttgctgaaattagattgaaatctaataattatgcaacacattatgcggagtctgtgaaagggaggttcaccatctcaagagatgattccaaaagtagtgtctacctgcaaatgaacaacttaagagctgaagacactggcatttattactgtaccaggcactacggctttccctactggtacttcgatgtctggggcgcagggaccacggtcaccgtctcctca

SEQ ID NO: 593 - DNA, 354 bp, Artificial Sequence
  846T.8D1 VH DNA sequence
cagattcagttgcagcagtctggagctgaactggtaaagcctggggcttcagtgaagttgtcctgcaaggcttctggctacaccttcacaagctatgatatatgctgggtgaggcagaggcctgagcagggacttgagtggattggatggatttttcctggagatggtactactaagtacactgagaacttcaagggcaaggccacactgactacagacaaatcctccagcacagcctacatgcacctcagcaggctgacatctgaggactctgctgtctatttctgtgcaagggagggggcgggctcctggtttgcttactggggccaagggactctggtcactgtctctgca

SEQ ID NO: 594 - DNA, 342 bp, Artificial Sequence
  847.10C9 VH DNA sequence
gaggttcagctgcagcagtctggagctgagctggtgcggcctgggacttcagtgaaggtgtcctgcaaggcttcggaatacgccttcaataattacatgatggaatgggtaaaacagaggcctggacagggccttgagtggattggagtgattaatcccggaagtggtgctactaattacaatgagaatttcaaggacaaggcaacactgactgcagacaaatcctccaccactgcctacatgcagctcagcagcctgacatctgatgactctgcggtctatttctgtacctacaatgatcttggttactggggccaagggactctggtcactgtctctgca

SEQ ID NO: 595 - DNA, 369 bp, Artificial Sequence
  847.11D6 VH DNA sequence
gaggtcaagctgcagcagtctggacctgagctgatgaagcctggaacttcaatgaagatatcctgtaaggcttctggttactcattcaccggctacaccatgaactgggtgaagcagagccatggaaagaaccttgagtggattggacttattaatccttacaatggtggtactaactacaaccagaagttcaggggcaaggccacattaagtgtagacaagtcatccaacacagcctacatggagctcctcagtctgacatctgaagactctgcagtctattactgtgcaagaaaggacgattattacggaagtagtccctatgctctggactactggggtcaaggaacctcagtcaccgtctcctca

SEQ ID NO: 596 - DNA, 348 bp, Artificial Sequence
  847.15D12 VH DNA sequence
caggtccagctgcagcagtctggagctgagctgatgaagcctggggcctcagtgaagatatcctgcaaggctactggctacacattcactaactactggatagagtgggtaaagcagaggcctggacatggccttgaatggattggagaatttttacctggagatggcagtagtcactacaatgagaagttcaagggcaaggccacattcacttcagatacatcctccaacacagcctacatacacctcaccagcctgacatctgaggactctgccgtctattactgtgtaagagatgactacgacagtgactactgggcccaaggcaccactctcacagtctcctca

SEQ ID NO: 597 - DNA, 360 bp, Artificial Sequence
  847.15F9 VH DNA sequence
caggtgcagatgaagcagtcaggacctggcctagtgcagccctcacagagcctgtccatcacctgcacagtctctggtttctcattaatcaactatggtgtacactgggttcgccaatctccaggaaagggtctggagtggctgggagtgatatggagtggtggaagcacagactataatgcagctttcatatccagactgagcatcagcaaggacaattccaagagccaagttttctttaaaatgaacagtctgcaagctgatgacacagccatatattactgtgccagaatttattactacggtaggggctatgctatggactactggggtcaaggaacctcagtcaccgtctcctca

SEQ ID NO: 598 - DNA, 366 bp, Artificial Sequence
  847.15H11 VH DNA sequence
gaggtccagcttcagcagtctggggctgaagttgtgaagcctggggctccagtgaagctgtcctgcaaggcttctggctacaccttcaacaactactggctgaactgggtgaaacagcggcctggacgaggcctcgagtggattggaaggattgatccttccgatagtgaaactcactacaatcaaaagttcaaggacaaggccacactgactgtagacatgtcctccagcacagcctacatccaactcagcagcctgacatctgaggactctgcggtctattactgtgcaagaggggattattattacggtactaggggtcctatggactactggggtcaaggcacctcagtcaccgtctcctca

SEQ ID NO: 599 - DNA, 345 bp, Artificial Sequence
  847.20H7 VH DNA sequence
caggtccagctgcagcagtctggggctgagctggtgaggcctggggcttcagtgaacctgtcctgcaaggcttctggctacaccttcaccaactactggatgaactgggtgaagcagaggcctggacaaggccttgaatgggttggtatgattgatccttcagacagtgaaactcactacaatcaaatgttcaaggacaaggccacattgactatagacaaatcttccagcatagcctacatgcagctcagcagcctgacatctgaggactctgcggtctattactgtgcaagatggggtgctatggactactggggtcaaggaacctcagtcaccgtctcctca

SEQ ID NO: 600 - DNA, 363 bp, Artificial Sequence
  847.21B11 VH DNA sequence
caggtgcaactgaagcagtcaggacctggcctggtggcgccctcacagagcctgtccatcacttgcactgtctctggattttcattaaccagctatggtgtacactgggttcgccagcctccaggaaagggtctggagtggctgggaataatatgggctggtggaagcacaaattataatccggctctcatgtccagactgagcatcagcaaagacaaatccaagagccaagttttcttaaaaatgaacagtctgaaaactgatgacacagccatgtactactgtgccagagatcgggcttcattactacggccgggggctatggactactggggtcaaggaacctcagtcaccgtctcctca

SEQ ID NO: 601 - DNA, 354 bp, Artificial Sequence
  847.27B9 VH DNA sequence
cagatccagttggtgcagtctggacctgagctgaagaagcctggagagacagtcaagatctcctgcaaggcttctgggtataccttcacaaactatggaatgaactgggtgaagcaggctccaggaaagggtttaaagtggatgggctggataaacaccaacactggagagccaacatatgctgaagagttcaagggacggtttgccttctctttggagacctctgccagcactgcctatttgcagatcaactacctcaaaaatgaggacacggctacatttttctgtgcaagattggactatgattacgacgaggactactggggccaaggcaccactctcacagtctcctca

SEQ ID NO: 602 - DNA, 360 bp, Artificial Sequence
  847.28D1 VH DNA sequence
caggtgcagcttgtagagaccggacctggcctggtggcgccctcacagagcctgtccatcacttgcactgtctctgggttttcattaaccagctatggtgtacactggattcgtcagtctccaggaaagggtctggagtggctgggaactatatgggctggtggaagcacagattataattcgccactcatgtccagactgagcatcagcaaagacaactccaagaaccaagtttttttaaaaatgaatagtctgcagattgatgacacagccatatattattgtgccagtcctccttctgggtatgattacgacgtgtttgcttcctggggccaagggactctggtcactgtctctgca

SEQ ID NO: 603 - DNA, 360 bp, Artificial Sequence
  847.2B8 VH DNA sequence
caggtacaactgaagcagtcaggacctggcctagtgcagccctcacagagcctgtccatcacctgcacagtctctggtttctcattaatcaactatggtgtacactgggttcgccaatctccaggaaagggtctggagtggctgggagtgatatggagtggtggaagcacagactataatgcagctttcatatccagactgagcatcagcaaggacaattccaagagccaagttttctttaaaatgaacagtctgcaagctgatgacacagccatatattactgtgccagaatttattactacggtaggggctatgctatggactactggggtcaaggaacctcagtcaccgtctcctca

SEQ ID NO: 604 - DNA, 360 bp, Artificial Sequence
  847.3B3 VH DNA sequence
caggtgcagctgaaggagtcaggacctggcctggtggcgccctcacagagcctgtccatcacttgcactgtctctgggttttcattaaccagctatggtgtacactggattcgccagcctccaggaaagggtctggagtggctgggaggaatatgggctggtggaagtacagattacaattcgcctctcatgtcccgactgagtatcactaaagacaactccaagagccaagttttcttaaaaatgaacagtctgcaaagtgatgacacagccatgtactactgtgccagtcctccctctgggtatgattacgacgtgtttgcttactggggccaagggactctggtcactgtctctgca

SEQ ID NO: 605 - DNA, 360 bp, Artificial Sequence
  849.1D2 VH DNA sequence
caggtgcagctgaaggagtcaggacctgtcctggtggcgccctcacagagcctgtccatcacttgcactgtctctgggttttcattaagcagctatggtgtacactgggttcgccagcctccaggaaagggtctggagtggctgggagtaatatgggctggtggaagcacagattatgattcagctctcatgtccagactgagcatcagcaaagacaactccaagagccaagttttcttaaaaatggacagtctgcaaactgatgacacagccatgtactactgtgccaaacccccatatgattacgacggggcctggtttgcttactggggccaagggactctggtcactgtctctgca

SEQ ID NO: 606 - DNA, 342 bp, Artificial Sequence
  849.2D7 VH DNA sequence
caggtgcaactgcagcagtctgggcctcagctggttaggcctggggcttcagtgaagatatcctgcaaggcttctggttactcattcaccaactactggatgcactgggtgaagcagaggcctggacaaggtcttgagtggattggcatgattgatccttccgatagtgaaactaggttaaatcagaagttcaaggacaaggccacattgactgtagacaaatcctccagcacagcctacatgcaactcagcagcccgacatctgaggactctgcggtctattactgtgcaacggggagacccgactactggggccaaggcaccactctcacagtctcctca

SEQ ID NO: 607 - DNA, 342 bp, Artificial Sequence
  849.2F12 VH DNA sequence
caggtgcaactgcagcagtctgggcctcagctggttaggcctggggcttcagtgaagatatcctgcaaggcttctggttactcattcaccagctactggatgcactgggtgaagcagaggcctggacaaggtcttgagtggattggcatgattgatccttccgatagtgaaactaggttaaatcagaagttcaaggacaaggccacattgactgtagacaaatcctccagcacagcctacatgcaactcagcagcccgacatctgaggactctatagtctattactgtgcaaaggggagacccgactactggggccaaggcaccactctcacagtctcctca

SEQ ID NO: 608 - DNA, 354 bp, Artificial Sequence
  849.4B2 VH DNA sequence
gatggaaaacttcaggagtcaggacctggcctcgtgaaaccttctcagtctctgtctctcacctgctctgtcactggctactccatcaccagtggttattactggaactggatccggcagtttccaggaaacaaactggaatggatgggccacataagctacgatggtagaaataactacaacccatctctcaaaaatcgaatctccatcactcgtgacacatctaagaaccagtttttcctgaagttgaattctgtgactactgaggacacagccacatattactgtgcaggctatgatttcctctggtacttcgatgtctggggcacagggaccacggtcaccgtctcctca

SEQ ID NO: 609 - DNA, 363 bp, Artificial Sequence
  849.4F12 VH DNA sequence
caggtgcagctgaaggagtctggccctgggatattgcagccctcccagaccctcagtctgacttgttctttctctgggttttcactgagcacttttggtatgggtgtaggctggattcgtcagccttcagggaagggtctggagtggctggcacacatttggtgggatgatgataaacactataacccagccctgaagagccggctcacaatctccaaggatacctccaaaaaccaggtcttcctcaggatcgccaatgtggacactgcagataatgccacatattactgtgctcgaatcgactatggtgactacgtcgggtttgcttattggggccaagggactctggtcactgtctctgca

SEQ ID NO: 610 - DNA, 354 bp, Artificial Sequence
  849.4F2 VH DNA sequence
gatggacagcttcaggagtcaggacctggcctcgtgaaaccttctcagtctctgtctctcacctgctctgtcactggctactccatcaccagtggttattactggaactggatccggcagtttccaggaaacaaactggaatggatgggccacataagctacgatggtagaaataactacaacccatctctcaaaaatcgaatctccatcactcgtgacacatctaagaaccagtttttcctgaagttgaattctgtgactactgaggacacagccacatattactgtgcaggctatgatttcctctggtacttcgatgtctggggcacagggaccacggtcaccgtctcctca

SEQ ID NO: 611 - DNA, 357 bp, Artificial Sequence
  849.5C2 VH DNA sequence
gaggttcagctgcagcagtctggggcagagcttgtgaagtcaggggcctcagtcaagttgtcctgcacagcttctggcttcaacattaaagactactatatgcactgggtgaagcagaggactgaacagggcctggagtggattggaaggatttatcctgaggatgatgaaactaaatatgccccgaaattccagggcaaggccactataacagcagacacatcctccaacacagcctacctgcagctcagcagcctgacatctgaggacactgccgtctattactgtgctagatcagggggttactacgtttggtttgcttactggggccaagggactctggtcactgtctctgca

SEQ ID NO: 612 - DNA, 363 bp, Artificial Sequence
  849.8D12 VH DNA sequence
gaggtccagctacaacagtctggacctgagctggtgaagcctgggtcttcagtgaagatatcctgcaaggcttctagatacacattcactgactacaacatggactgggtgaagcagagccatggaaagagacttgagtggattggatatatttatcctaacaatggtggtactggctacaaccagaagttcaagggcaaggccacattgactgtagacaagtcctccagcacagcctacatggagctccgcagcctgacatctgaggactctgcagtctattactgtgcaaggtcctactacgatggtagctacgatgctatggactactggggtcaaggaacctcagtcaccgtctcctca

SEQ ID NO: 613 - DNA, 342 bp, Artificial Sequence
  F847C.21H6 VH DNA sequence
cagatccagttggtgcagtctggacctgagctgaagaagcctggagagacagtcaagatctcctgcaaggcttctgggtataccttcacaatctttggaatgaactgggtgaagcaggctccaggaaagggtttaaagtggatgggctgggtaaacacctacactggagagccaacatatgctgatgacttcaagggacggtttgccttctctttggaaacctctgccagcactgcctatttgcagatcaacaacctcaaaaatgaggacacggctacatatttctgtgcaagaggctggtttgcttactggggccaagggactctggtcactgtctctgca

SEQ ID NO: 614 - DNA, 360 bp, Artificial Sequence
  849.5H1 VH DNA sequence
caggtgcagctgaaggagtcaggacctgtcctggtggcgccctcacagagcctgtccatcacttgcactgtctctgggttttcattaaccagttatggtatacactgggttcgccagcctccaggaaagggtctggagtggctgggagtaatatgggctggtggaagcacaaattataattcagctctcatgtccagactgagcatcagcaaagacaactccaagagccaagttttcttaaaaatgaacagtctgcaaattgatgacacagccatgtactattgtgccaaacccccccatgattacgaccaggcctggtttgcttactggggccaagggactctgatcactgtctctgca

SEQ ID NO: 615 - DNA, 348 bp, Artificial Sequence
  847.23F11 VH DNA sequence
caggtccagctgcagcagtctggggctgagctggtgaggcctggggcttcagtgaagctgtcctgcaaggcttctggctacaccttcaccagctcctggatgaactgggtgaaacagaggcctggacaaggccttgactggattggtatgattgatccttcagacagtgaaactcactacaatcaaatgttcaaggacaaggccacattgactgtagacaaatcctctaacacagcctacatgcagctcagcaggctgacatctgaggactcagcggtctattactgtgtaaatagtaactacgagagtggctattggggccaaggcaccactctcacagtctcctca

SEQ ID NO: 616 - DNA, 348 bp, Artificial Sequence
  847.16D10 VH DNA sequence
caggtccagctgcagcagtctggggctgagctggtgaggcctggggcttcagtgaagctgtcctgcaaggcttctggctacaccttcaccggctactggttgaactgggtgaagcagaggcctggacaaggcctggaatggattggtatgattgatccttcagacagtgaaactcactacaatcaagtgttcaaggacaaggccacaatgactgtagacaggtcctccagcacagcctacatgcagctcagcggactgacatctgaggactctgcggtctattactgtgcaaatagtaactacgcgagtggctcctggggccagggcaccactctcacagtctcctca

SEQ ID NO: 617 - DNA, 360 bp, Artificial Sequence
  847.13E2-mH0mL1 VH DNA sequence
gaggtccagcttcagcagtctggacctgagctggtgaagcctggggcttcagtgaaggtttcctgcaaggcttctggttactcattcactgactacaacatgtactgggtgatgcagagccatggaaagagccttgagtggattggatatattgatccttacaatgatgctactagctacagccagaagttcacgggcaaggccacattgactgttgacaagtcctccagcacagccttcatgcatctcaacagcctgacatctgaggactctgcagtctattactgtgcaagatgggggaggtacgaatactatgctatggactattggggtcaaggaacctcagtcaccgtctcctca

SEQ ID NO: 618 - DNA, 360 bp, Artificial Sequence; identical to SEQ ID NO: 617
  847.13E2-mH0mL2 VH DNA sequence

SEQ ID NO: 619 - DNA, 345 bp, Artificial Sequence
  847.12C4 VH DNA sequence
caggtacagctgaaggagtcaggacctgaccttgtgcagccctcacagaccctgtctctcacctgcactgtctctgggttctcattaaccatctatggtgttcactgggttcgccagcctccaggaaagggactggagtgggtgggaacagtggcctgggatgacaaaaaatattataattcacctctacaatctcgactgagcatcagcagggatacctccaagaaccaagttttcttaaaactgagcagtctgcaaactgaagacacagccatgtactactgtactatgactgggggccctataaactactggggtccaggaacctcagtcaccgtctcctca

SEQ ID NO: 620 - DNA, 351 bp, Artificial Sequence
  847.4D3 VH DNA sequence
gaggtgcagctggtggagtctgggggaggcttagtgaagcctggagggtccctgaaactctcctgtgcagcctctggattcactttcagtagctatgccatgtcttgggttcgccagactccagagaagaggctggagtgggtcgcatccattagtagtggtgatagcccctactatccagacagtgtgaagggccgcttcaccatctccagagataatgccaggaacatcctgtacctgcaaatgagcagtctgaggtctgaggacacggccatgtattactgtacaaggtttactacggtagtagagatggactactggggtcaaggaacctcagtcaccgtctcctca

SEQ ID NO: 621 - DNA, 336 bp, Artificial Sequence
  TB001 VL DNA sequence
gacatcgtgctgacccagtctccactgagcctgcctgttacacctggcgagccagcctccatctcctgcagatcctctaagtccctgctgtacaaggacggcaagacctacctgaactggttcctgcagaagcccggccagtctcctcagctcctgatctacctgatgagcacccatgcctctggcgtgcccgatagattttccggctctggctctggcaccgacttcaccctgaagatctccagagtggaagccgaggacgtgggcgtgtactactgtcagcagctggtggactaccctctgacctttggcggcggaacaaagctggaaatcaag

SEQ ID NO: 622 - DNA, 336 bp, Artificial Sequence
  TB006 VL DNA sequence
gatatagtgatgacccaaacacctttgtccctgtcagtcaccccaggccaacccgcatctatctcatgcaaatcctcaaaaagtcttttgcactctgacgggataacatatctctactggtatcttcaaaaacctggtcagtccccccagctcttgatctatagaatgagtaaccttgcctctggtgtccccgaccggtttagtggaagcgggtctgggaccgacttcaccctcaagattagtcgcgtcgaagccgaagatgtgggagtgtattactgtgcccagatgctcgaatttcccctgacatttggtcaaggaactaaattggagattaag

SEQ ID NO: 623 - DNA, 321 bp, Artificial Sequence
  12G5.D7 VL DNA sequence
gacatcctgatgacccaatctccatcctccatgtctgtatctctgggagacacagtcagcatcacttgccatgcaagtcagggcattaactctaatatggggtggttgcagcagaaaccagggaaatcatttaagggcctgatctatcatgcaaccaacttggaagatggagttccatcaaggttcagtggcagtggatctggagcagattattctctcaccatcagcagcctggaatctgaagattttgcagactattactgtgtacagtatgctcagtttcctcctacgttcggatcggggaccaagctggaaataaaa

SEQ ID NO: 624 - DNA, 336 bp, Artificial Sequence
  13A12.2E5 VL DNA sequence
gatgttgtgatgacccagactccactcactttgtcggttgccattggacaaccagcttccatctcttgcaagtcgagtcagagcctcttatatactaatggaaaaacctatttgaattggttattacagaggccaggccagtctccaaaacgcctaatctatctgctgtctaaattggactctggagtccctgacaggttcagtgccagtggatcagggacagatttcacactgaaaatcagcagagtggaggctgaggatttgggagtttattactgcttgcagagtacacattttccgctcacgttcggtgctgggaccaagctggagatgaaa

SEQ ID NO: 625 - DNA, 336 bp, Artificial Sequence
  14H10.2C9 VL DNA sequence
gatgttgtgatgacccagactccactcactttgtcggttaccattggacaaccagcctccatctcttgcaagtcaagtcagagcctcttcgatagtgatggaaagacatatttgaattggttgttacagaggccaggccagtctccaaagcgcctaatctatctggtgtctaaactggactctggagtccctgacaggttcactggcagtggatcagggacagatttcacactgaaaatcagcagagtggaggctgaggatttgggagtttattattgctggcaaggtacacattttcctctcacgttcggtgctgggaccaagctggaaatgaaa

SEQ ID NO: 626 - DNA, 336 bp, Artificial Sequence
  15F10.2D6 VL DNA sequence
gatgttttgatgacccaaactccactctccctgcctgtcagtcttggagatcaagcctccatctcttgcagatctagtcagagcattgtacataataatggaaacacctatttagaatggtacctgcagaaaccaggccagtctccaaaactcctgatctacaaagtttccaaccgattttctggggtcccagacaggttcagtggcagtggatcagggacagatttcacactcaagatcagcagagtggaggctgaggatctgggagtttattactgctttcaaggttcacatgttccgctcacgttcggtggtgggaccaagttggagctgaaa

SEQ ID NO: 627 - DNA, 321 bp, Artificial Sequence
  19B5.2E6 VL DNA sequence
gatatacaaatgactcaaactacctcttctctttccgcatctttgggtgatcgggtcactatatcctgctccgcctctcaaggcataaacaattacctgaattggtatcagcaaaaaccagacggaactgtaaaattgcttatctactacgcttcaagtctgcatagtggggttcccagcagattttccggttccgggtccggcactgattattctctcacaattagtaacctggaacctgaggacattgcaacttattactgtcaacaatacagtcaggtaccttacactttcggatcaggaacaaagttggaaatcaag

SEQ ID NO: 628 - DNA, 321 bp, Artificial Sequence
  20D11.2C6 VL DNA sequence
gacatccagatgaaccagtctccatccagtctgtctgcatccctcggagacacaattaccatcacttgccgtgccagtcagaacatttatatttggttaagttggtaccagcagaaaccaggaaatattcctaaactcttgatctataaggcttccaacttgcacacaggcgtcccatcaaggtttagtggcagtggatctggaacagatttcacattaaccatcagcactctgcagcctgaagacattgccacttacttctgtctccagggtcaaagttatcctctcacgttcggtgctgggaccaagctggagatgaaa

SEQ ID NO: 629 - DNA, 321 bp, Artificial Sequence
  20H5.A3 VL DNA sequence
gatatccagatgacacagactacatcctccctgtctgcctctctgggagacagagtcaccatcaattgcagtgcaagtcaggacattagcaattatttaaactggtatcagcagaaaccagatggaactgttaaactcctgatctattacacatcaagtttactctcaggagtcccatcaaggttcagtggcagtgggtctgggacagattattctctcaccatcagcaacctggaacctgaagatattgccacttacttttgtcagcaatatagtaagcttccctatacgttcggatcggggacccacctggaaataaaa

SEQ ID NO: 630 - DNA, 321 bp, Artificial Sequence
  23H9.2E4 VL DNA sequence
gatatccagatgacacagactacatcctccctgtctgcctctctgggagacagagtcaccatcagttgcagtgcaagtcagggcattaacaattatttaaactggtatcagcagaaaccagatggaactgttaaactcctgatctattacgcatcaagtttacactcaggagtcccatcaaggttcagtggcagtgggtctgggacagattattctctcaccatcagcaacctggaacctgaagatattgccacttactattgtcagcagtatagtcaggttccgtatacgttcggatcggggaccaagttggaaataaaa

SEQ ID NO: 631 - DNA, 336 bp, Artificial Sequence
  2D10-VH0-VL0 VL DNA sequence
gacatagtaatgacacaggccgcatttagcaatccagtaaccttgggcacatccgcctccatatcttgcaggtcatccaaaagcttgctgcactctgacggtattacttacctgtactggtatttgcagcgacctgggcaatcccctcaactcctgatttaccgcatgagcaacctggcctcaggggtgcctgaccgcttttcaggatcagggagcggcactgacttcaccttgcgaatcagcagagtagaagcagaggatgttggagtttactactgtgcccagatgatcgaatttccacttacttttggggccgggaccattctggagcttaaa

SEQ ID NO: 632 - DNA, 336 bp, Artificial Sequence
  3B11.2G2 VL DNA sequence
gatgttgtgatgacccagactccactcactttgtcggttgccattggacaaccagcttccatctcttgcaagtcgagtcagagcctcttatatactaatggaaaaacctatttgaattggttattacagaggccaggccagtctccaaaacgcctaatctatctggtgtctaaattggactctggagtccctgacaggttcagtggcagtggatcagggacagatttcacactgaaaatcagcagagtggaggctgaggatttgggagtttattactgcttgcagagtacacattttccgctcacgttcggtgctgggaccaagctggagctgaaa

SEQ ID NO: 633 - DNA, 336 bp, Artificial Sequence
  7D8.2D8 VL DNA sequence
gatgttttgatgacccaaactccactctccctgcctgtcagtcttggagatcaagcctccatctcttgcagatctagtcagagcattgtacatagtaatggaaacacctatttagaatggtacctgcagaaaccaggccagtctccaaagctcctgatctacaaagtttccaaccgattttctggggtcccagacaggttcagtggcagtggatcagggacagatttcacactcaagatcagcagagtggaggctgaggatctgggagtttattactgctttcaaggttcacatgttccgctcacgttcggtgctgggaccaagctggagctgaaa

SEQ ID NO: 634 - DNA, 336 bp, Artificial Sequence
  mIMT001 VL DNA sequence
gatattgttattactcaggatgagcttagtaatcctgtcactagcggggaaagtgttagtatcagttgtcgttcatccaagtcactcctctacaaagacggcaagacttatctcaactggtttcttcaacgacccggtcaatctccacagctcctgatttacctgatgtcaactcacgcttctggtgttagcgaccgtttctccggaagtggctccgggacagacttcactcttgaaatctcacgtgtaaaagcagaggacgtaggtgtctattattgtcaacagcttgtggactaccccttgacctttggcgctggcacaaagctggaactgaag

SEQ ID NO: 635 - DNA, 336 bp, Artificial Sequence
  4A11.2B5 VL DNA sequence
gacattgtgatgactcaggcagccttttccaaccctgtaacacttggaactagtgcctccatctcatgccgttccagcaagagtcttttgcacagcgatgggataacctatctctattggtatctgcaacgacccggtcagtcaccccaacttcttatctatcgaatgtctaacttggcctccggcgtgcccgaccgcttttccgggagtgggagcggtacagatttcaccttgcgaatttcccgggttgaggcagaggacgtaggtgtctactattgtgctcagatgcttgagtttcctctcactttcggagccggcaccaaactggaactgaaa

SEQ ID NO: 636 - DNA, 336 bp, Artificial Sequence; identical to SEQ ID NO: 622
  4A11.H1L1 VL DNA sequence

SEQ ID NO: 637 - DNA, 336 bp, Artificial Sequence
  4A11.H4L2 VL DNA sequence
gatattgtaatgacccaaagccccctgtccttgcctgttaccccaggtgagcctgccagcatatcttgccgatccagtaaatctctgcttcatagcgatggcatcacctatttgtattggtatttgcagaagcccggccagagcccccagttgctgatctacagaatgtccaaccttgctagtggagtgcccgaccggtttagcggttcaggctcagggactgatttcactcttaaaatcagtagggtagaggccgaagacgttggtgtatattattgtgctcagatgttggagtttccactcacatttggacaaggtacaaagctggaaattaag

SEQ ID NO: 638 - DNA, 336 bp, Artificial Sequence
  4G2.2G6 VL DNA sequence
gatgtcgtaatgactcaaacccccctgacccttagtgttactataggccagcccgcaagcatctcctgcaaatcctcccagtctcttctttatactgatggcaaaacctacttgtcctggtttttgcagcgcccaggtcaaagtcctaaacgtcttatttacttggtctctaaactcgattccggcgtgcctgaccggttctccggtagcggtagcggtaccgatttcactttgaagattagccgagttgaggcagaagacctcggggtctactactgccttcagagtacacacttcccacttacatttggcgcaggaaccaagttggaggttaaa

SEQ ID NO: 639 - DNA, 321 bp, Artificial Sequence
  6B3.2D3 VL DNA sequence
agtattgtgatgacccagactcccaaattcctgcttgtatcagcaggagacagggttaccataacctgcaaggccagtcagagtgtgagtaatgatgtagcttggtaccaacagaagccagggcagtctcctaaattgttgatatattatgcatccaatcgctacactggagtccctgatcgcttcactggcagtggatatgggacggatttcactttcaccatcagcactgtgcaggctgaagacctggcagtttatttctgtcagcaggattatacctctccgtacacgttcggaggggggaccaagctggaaataaaa

SEQ ID NO: 640 - DNA, 321 bp, Artificial Sequence
  6H6.2D6 VL DNA sequence
gacatccagatgacccagaccacctcctccctgtccgcctccctgggcgacagggtgaccatctcctgctccgcctcccagggcatctccaactacctgaactggtaccagcagaagcccgacggcaccgtgaagctgctgatctactacacctcctccctgcactccggcgtgccctccaggttctccggctccggctccggcaccgactactccctgaccatctccaacctggagcccgaggacatcgccacctactactgccagcagtactccgagctgccctacaccttcggctccggcaccaagctggagatcaag

SEQ ID NO: 641 - DNA, 321 bp, Artificial Sequence
  9H2.2H10 VL DNA sequence
gacattgtgatgacccagtctcacaaattcatgtccacatcagtaggagacagggtcagcatcacctgcaaggccagtcaggatgtgagtactgctgtagcctggtatcaacaaaaaccagggcaatctcctaaactactgatttactgggcatccacccggcacactggagtccctgatcgcttcacaggcagtggatctgggacagattatactctcaccatcagcagtgtgcaggctgaagacctggcactttattactgtcagcaacattataccactccgctcacgttcggtgctgggaccaagctggagctgaaa

SEQ ID NO: 642 - DNA, 321 bp, Artificial Sequence
  13G4.2F8 VL DNA sequence
gacattgtgatgacccagtctcaaaaattcatgtccacatcagtaggagagagggtcagcatcacctgcaaggccagtcagaatgtaggtactaatgtagcctggtatcagcagaaagcagggcagtctcttgaactgctgatctatggggcatccaaccggcacactggagtccctgatcgcttcacaggcagtggatctgggacagatttcactctcaccatcaccaatgtgcagtctgaagacatgacaaattatttctgtgagcaatatagcaactttcctctcacgttcggtgctgggaccaagctggagctgaaa

SEQ ID NO: 643 - DNA, 336 bp, Artificial Sequence
  13H12.2F8 VL DNA sequence
gacgttgttatgacacaaacaccacttacactttctgtaactatcggtcagcctgcctcaatttcatgtaagtcttctcagtccctgtttcatagcgacgggaagacttacctgaattggcttctccaacgaccaggccaatcacccaagcgccttatttatttggtcagtaaattggacagtggagttcccgatagatttaccgggagcggttctgggaccgatttcaccccaaagatctccagggtagaagacgaagatctcggtgtgtactattgctggcaggggacacatttccctctgacattcggtgctggaaccaaacttgagatgaaa

SEQ ID NO: 644 - DNA, 321 bp, Artificial Sequence
  15G7.2A7 VL DNA sequence
gacatccagatgaaccagtctccatccagtctgtctgcatccctcggagacacaatttccatcacttgccgtgccagtcagaacattaatatttggttaagctggtaccagcagaaaccaggaaatattcctcaactattgatctataaggcttccaacttgcacacaggcgtcccctcaaggtttagtggcagtggatctggaacagatttcacattaaccatcagcagtctgcagcctgaagacattgccacttactactgtctacagggtcaaagttatcctctcacgttcggtgctgggaccaagctggtgatgaaa

SEQ ID NO: 645 - DNA, 330 bp, Artificial Sequence
  19D9.2E5 VL DNA sequence
gatgttgtgatgacccagactccactcactttgtcggttaccattggacaaccagcctccatctcttgtaagtcaagtcagagcctcttacatagtgatggaaagacatatttgaattggttgttacagaggccaggccagcctccaaagcgcctaatgtatctggtgtctacactggactctggagtccctgacaggttcactggcagtggatcagggacagatttcacactgaaaatcagcagagtggaggctgaggatttgggagtttattattgctggcaaggtacacattttcctctcacgttcggtgctgggaccaagccggag

SEQ ID NO: 646 - DNA, 330 bp, Artificial Sequence
  23B10.2B12 VL DNA sequence
gatattgtgatgacgcaggctgcattctccaatccagtcactcttggaacgtcagcttccatctcctgcaggtctagtaagagtctcctacatagtgatggcatcacttatttctattggtatctgcagaggccaggccagtctcctcagctcctgatatatcggatgtccaaccttgcctcaggagtcccagacaggttcagtggcagtgggtcaggaactgatttcacactgagaatcagcagagtggaggctgaggatgtgggtgtttattactgtgctcaaatgctagaattcccgctcacgttcggtgctgggaccaagctggag

SEQ ID NO: 647 - DNA, 321 bp, Artificial Sequence
  24D12.2H9 VL DNA sequence
gacattgtgatgacccagtctcacaaattcatgtccacatcagtaggagacagggtcagcatcacctgcaaggccagtcaggatgtgcgtactgctgtagcctggtatcaacagaaaccagggcaatctcctaaactactgatttactgggcatccacccggcacactggagtccctgatcgcttcacaggcagtggatctgggacagatttcactctcacccttagcaatgtgcagtctgaagacttggcagattatttctgtcagcaatatagtagttatccgtggacgttcggtggaggcaccaagctggaaatcaaa

SEQ ID NO: 648 - DNA, 336 bp, Artificial Sequence
  F846C.1B2 VL DNA sequence
aacatttggttgacacagtcgccatcatctctggctgtgtctgcaggagaaatggtcactatgacctgtaagtccagtcaaagtgttttatacagttcaaatcagaagaactacttggcctggtaccagcagaaaccagggcagtctcctaaactgctgatctactgggcatccactagggaatctggtgtccctgatcgcttcacaggcagtggatctgggacagacttttctcttaccatcagcagtgtacaagctgaagacctggcagtttattactgtcatcaatatctctcctcgctcacgttcggtgctgggaccaagctggagctgaaa

SEQ ID NO: 649 - DNA, 336 bp, Artificial Sequence
  F846C.1F5 VL DNA sequence
aacattatgatgacacagtcgccatcatctctggctgtgtctgcaggagaaaaggtcactatgagctgtaagtccagtcaaagtgttttatacagttcaaatcagaagaactacttggcctggtaccagcagaaaccagggcagtctcctaaactgctgatctactgggcatccactagggaatctggtgtccctgatcgcttcacaggcagtggatctgggacagattttactcttaccatcagcagtgtacaacctgaagacctggcagtttattactgtcatcaatacctctcctcgctcacgttcggtgctgggaccaagctggagctgaaa

SEQ ID NO: 650 - DNA, 336 bp, Artificial Sequence
  F846C.1H12 VL DNA sequence
aacattatgatgacacagtcgccatcatctctggctgtgtctgcaggacaaaaggtcactatgagctgtaagtccagtcaaagtgttttatacagttcaagtcagaagaactacttggcctggtaccagcagaaaccagggcagtctcctaaacttctgatctactgggcatccactagggaatctggtgtccctgatcgcttctcaggcagtggatctgggacagattttactcttaccatcagcagtgtacaacctgaagacctggcagtttattactgtcatcaatacctctcctcgctcacgttcggtgctgggaccaagctggagctgaaa

SEQ ID NO: 651 - DNA, 336 bp, Artificial Sequence
  F846C.1H5 VL DNA sequence
gatgttgtgatgacccaaactccactctccctgcctgtcagtcttggagatcaagcctccatctcttgcagatctagtcagagccttgtacacaatagtggaaacacctatttacattggtacctgcagaggccaggccagtctccaaacctcctgatctacaaagtttccaaccgattttctggggtcccagacaggttcagtggcagtggatcagggacagatttcacactcaagatcagcagagtggcggctgaggatctgggagtttatttctgctctcaaagtacacatgttcctccgacgttcggtggaggcaccaagctggaaatcaaa

SEQ ID NO: 652 - DNA, 336 bp, Artificial Sequence; identical to SEQ ID NO: 649
  F846C.2H3 VL DNA sequence

SEQ ID NO: 653 - DNA, 327 bp, Artificial Sequence
  F846TC.14A2 VL DNA sequence
caggctgttgtgactcaggaatctgcactcaccacatcacctggtgaaacagtcacactcacttgtcgctcaagtactggggctgttacaactagtaactatgccaactgggtccaagaaaaaccagatcatttattcactggtctaataggtggtatcaataaccgagttccaggtgttcctgccagattctcaggctccctgattggagacaaggcagccctcaccatcacaggggcacagactgaggatgaggcaatatatttctgtgctctatggtatagcaaccattgggtgttcggtggaggaaccaaactgactgtccta

SEQ ID NO: 654 - DNA, 336 bp, Artificial Sequence
  F846TC.14E4 VL DNA sequence
gatattgtgatgacgcaggctgcattctccaatccagtcactcttggaacatcagcttccatctcctgcaggtctagtaagagtctcctacatactaatggcatcacttttttgtattggtatctgcagaagccaggccagtctcctcagcccctgatttatcagatgtccaaccttgcctcaggagtcccagacaggttcagtagcagtgggtcaggaactgatttcacactgagaatcagcagagtggaggctgaggatgtgggtgtttattactgtgctcaaaatctagaacttccttggacgttcggtggaggcaccaagctggaaatcaat

SEQ ID NO: 655 - DNA, 336 bp, Artificial Sequence
  F846TC.16B5 VL DNA sequence
aacattatgatgacacagtcgccatcatctctggctgtgtctgcaggagaaaaggtcactatgagctgtaagtccagtcaaagtgttttatacagttcaaatcagaagaactacttggcctggtaccagcagaaaccagggcagtctcctaaactactgatctactgggcatccactagggaatctggtgtccctgatcgcttcacaggcagtggatctgggacagattttactcttaccatcagcagtgtacaagctgaagacctggcagtttattactgtcatcaatacctctcctcgctcacgttcggtgctgggaccaagctggagctgaaa

SEQ ID NO: 656 - DNA, 339 bp, Artificial Sequence
  F846TC.7F10 VL DNA sequence
gacattgtgatgacacagtctccatcctccctggctatgtcagtaggacagaaggtcactatgagctgcaagtccagtcagagccttttaaatagtagcaatcaaaagaactatttggcctggtaccagcagaaaccaggacagtctcctaaacttctggtatactttgcatccactagggaatctggggtccctgatcgcttcataggcagtggatctgggacagatttcactcttaccatcagcagtgtgcaggctgaagacctggcagattacttctgtcagcaacattatagcactccgtacacgttcggagggggggccaagctggaaataaaa

SEQ ID NO: 657 - DNA, 321 bp, Artificial Sequence
  F847C.10B9 VL DNA sequence
gacatccggatgactcagtctccatccagtctgtctgcatcccttggagacacaattaccatcacttgccatgccagtcagaacattaatgtttggttaagctggtaccagcagaaaccaggaaatattcctaaactattgatctataaggcttccaacttgcacacaggcgtcccatcaaggtttagtggcagtggatctggaacaggtttcacattaaccatcagcagcctgcagcctgaagacattgccacttactactgtcaacagggtcaaagttatccgtacacgttcggaggggggaccaagctggagctgaaa

SEQ ID NO: 658 - DNA, 321 bp, Artificial Sequence
  F847C.11B1 VL DNA sequence
gaaattgtgttgacccagtctccagcatccctgtccgtgactacaggagaaaaagtcactatcagatgcataaccagcattgatattgatgatgatatgaactggtaccagcagaagccaggggaacctcctaagctccttatttcagaaggcaatactcttcgtcctggagtcccatcccgattctccagcagtggctatggcacagattttgtttttacaattgaaaacacgctctcagaagatgttgcagattactactgtttgcaaagtgataacaagcctctcacgttcggtgctgggaccaagctggagctgaaa

SEQ ID NO: 659 - DNA, 321 bp, Artificial Sequence
  F847C.12F12 VL DNA sequence
gacatccaggtgattcagtctccatccagtctgtctgcatcccttggagacacaattaccatcacttgccatgccagtcagaacattaatgtttggttaagctggtaccagcagaaaccaggaaatattcctaaactattgatctataaggcttccaacttgcacacaggcgtcccatcaaggtttagtggcagtggatctggaacaggtttcacattaaccatcagcagcctgcagcctgaagacattgccacttactactgtcaacagggtcaaagttatccgtacacgttcggaggggggaccaagctggagctgaaa

SEQ ID NO: 660 - DNA, 321 bp, Artificial Sequence
  F847C.26F5 VL DNA sequence
gaaattaagatgaaccagtctccatccagtctgtctgcatcccttggagacacaattaccatcacttgccatgccagtcagaacattaatgtttggttaagctggtaccagcagaaaccaggaaatattcctaaactattgatctataaggcttccaacttgcacacaggcgtcccatcaaggtttagtggcagtggatctggaacaggtttcacattaaccatcagcagcctacagcctgaagacattgccacttactactgtcaacagggtcaaagttatccgtacacgttcggaggggggaccaagctggagctgaaa

SEQ ID NO: 661 - DNA, 327 bp, Artificial Sequence
  F847C.4B10 VL DNA sequence
caggctgttgtgactcaggaatctgcactcaccacatcacctggtgaaacagtcacactcacttgtcgctcaagtactggggctgttacaactagtaactatgccaactgggtccaagaaaaaccagatcatttattcactggtctaataggtggtaccaacaaccgagctccaggtgttcctgccagattctcaggctccctgattggagacaaggctgccctcaccatcacaggggcacagactgaggatgaggcaatatatttctgtgctctatggtacagcaaccatttagtgttcggtggaggaaccaaactgactgtccta

SEQ ID NO: 662 - DNA, 336 bp, Artificial Sequence
  F849C.8D10 VL DNA sequence
gatgttttgatgacccaaactccactctccctgcctgtcagtcttggagatcaagcctccatctcttgcagatctagtcaggacattgtgcatagtagtggaaacacctatttagaatggtacctgcagaaaccaggccagtctctaaagctcctgatttacaaagtttccaaccgattttctggggtcccagacaggttcagtgccagtggatcagggacagatttcacactcaagatcagcagagtggaggctgaggatctgggagtttattactgctttcaaggttcacatgttcctcccacgttcggctcggggacaaagttggaaataaaa

SEQ ID NO: 663 - DNA, 336 bp, Artificial Sequence
  F849C.8H3 VL DNA sequence
gatattgggatgaggcaggctgcattctccaatccagtcactcttggaacatcagcttccatctcctgcaggtctagtaagagtctcctatatagtaatggcatcacttatttgtattggtttctccagaagccaggccagtctcctcagctcctgatttatcagatgtccaaccttgcctcaggagtcccagacaggttcagtagcagtgggtcaggaactgatttcacactgagaatcagcagagtggaggctgacgatgtgggtgtttattactgtgctcaaaatctagaacttccgtggacgttcggtggaggcaccaagctggaaatcaaa

SEQ ID NO: 664 - DNA, 333 bp, Artificial Sequence
  846.2B11 VL DNA sequence
gacattgtgctgacacagtctcctgcttccttaggtgtttctctggggcagagggccaccatctcatgcagggccagcaaaagtgtcagtacatctggctatagttatatgcactggtaccaacagaaaccaggacagccacccaaactcctcatctatcttgcatccatcctagaatctggggtccctgccaggttcagtggcagtgggtctgggacagacttcaccctcaacatccatcctgtggaggaggaggatgctgcaatctattactgtcagcacagtagggagcttcctctcacgttcggtgctgggaccaagctggagctgaaa

SEQ ID NO: 665 - DNA, 333 bp, Artificial Sequence
  846.4D5 VL DNA sequence
aacattgtgctgacccaatctccagcttctttggctgtgtctctagggcagagggccaccatatcctgcagagccagtgaaagtgttgatagttatggcaatagttttatgcactggtaccagcagaaaccaggacagccacccaaactcctcatctatcttgcatccaacctagaatctggggtccctgccaggttcagtggcagtgggtctaggacagacttcaccctcaccattgatcctgtggaggctgatgatgctgcaacctattactgtcagcaaaataatgaggatccgtggacgttcggtggaggcaccaagctggaaatcaaa

SEQ ID NO: 666 - DNA, 336 bp, Artificial Sequence
  846T.1H2 VL DNA sequence
gatgttgtgatgacccagactccactcactttgtcggttaccattggacaaccagcctctatctcttgcaagtcaagtcagagtctcttatatagtaatggaaaaacctatttgaattggttattacagaggccaggccagtctccaaagcgcctaatctatctggtgtctaaactggactctggagtccctgacaggttcactggcagtggatcaggaacagattttacactgaaaatcagcagagtggaggctgaggatttgggagtttattactgcgtgcaaggtacacattttcctcagacgttcggtggaggcaccaagctggaaataaaa

SEQ ID NO: 667 - DNA, 327 bp, Artificial Sequence; identical to SEQ ID NO: 661
  847.14H4 VL DNA sequence

SEQ ID NO: 668 - DNA, 333 bp, Artificial Sequence
  846.2D4 VL DNA sequence
aacattgtgctcacccaatctccagcttctttggctgtgtctctagggcagagggccaccatatcctgcagagccagtgaaagtgttgatagttatggcaatagttttatgcactggtaccagcagaaaccaggacagccacccaaactcctcatctatcttgcatccaacctagaatctggggtccctgccaggttcagtggcagtgggtctaggacagacttcaccctcaccattgatcctgtggaggctgatgatgctgcaacctattactgtcagcaaaataatgaggatccgtggacgttcggtggaggcaccaagctggaaataaaa

SEQ ID NO: 669 - DNA, 321 bp, Artificial Sequence
  846.2F11 VL DNA sequence
gacatcctgatgacccaatctccatcctccatgtctgtatctctgggagacacagtcagcatcacttgccatgcaagtcagggcattaacagtaatatagggtggttgcagcagaaaccagggaagtcatttaagggcctgatctatcatggaaccaacttggaagatggagttccatcaaggttcagtggcagtggatctggagcagattattctctcaccatcagcagcctggaatctgaagattttgcggactattactgtgtacagtatgatcagtttccgtggacgttcggtggaggcaccaagctggaaatcaaa

SEQ ID NO: 670 - DNA, 333 bp, Artificial Sequence
  846T.10B1 VL DNA sequence
gacattgtgatgtcacagtctcctgcttccttaggtgtttctctggggcagagggccaccatctcatgcagggccagcaaaagtgtcagtacatctggctatagttatatgcactggtaccaacagaaaccaggacagccacccaaactcctcatctatcttgcatccatcctagaatctggggtccctgccaggttcagtggcagtgggtctgggacagacttcaccctcaacatccatcctgtggaggaggaggatgctgcaatctattactgtcagcacagtagggagcttcctctcacgttcggtgctgggaccaagctggagctgaaa

SEQ ID NO: 671 - DNA, 333 bp, Artificial Sequence
  846T.2E3 VL DNA sequence
gacattgtgctgacacagtctcctgcttccttagctgtatctctggggcagagggccaccatctcatgcagggccagcaaaagtgtcagtacatctggctatagttatatgcactggtaccaacagaaaccaggacagccacccaaactcctcatctatcttgcatccatcctagaatctggggtccctgccaggttcagtggcagtgggtctgggacagacttcaccctcaacatccatcctgtggaggaggaggatgctgcaacctattactgtcagcacagtagggagcttcctctcacgttcggtgctgggaccaagctggagctgaaa

SEQ ID NO: 672 - DNA, 321 bp, Artificial Sequence
  846T.4C9 VL DNA sequence
gacattttgatgacccaaactccatcctccatgtctgtatctctgggagacacagtcagcatcacttgccatgcaagtcagggcattagcagtaatatagggtggttgcagcagaaaccacggaaatcatttaagggcctgatctattatggaaccaacttggaagatggagttccatcaaggttcagtggcagtggatctggagcagattattctctcaccatcagcagcctggaatctgaagattttgcagactattactgtgtacagtatgatcagtttccgtggacgttcggtggaggcaccaagctggaaataaaa

SEQ ID NO: 673 - DNA, 333 bp, Artificial Sequence
  846T.4E11 VL DNA sequence
gacattgtgctgacacagtctcctgcttccttagctgtatctctggggcagagggccaccatctcatgcagggccagcaaaagtgtcagtacatctggctatagttgtatgcactggtaccaacagaaaccaggacagccacccaaactcctcatctatcttgcatccaacctagaatctggggtccctgccaggttcagtggcggtgggtctgggacagacttcaccctcagcatccatcctgtggaggaggaggatgctgcaacctattactgtcaccacagtacggagcttccgtacacgttcggaggggggaccaagctggaagtagaa

SEQ ID NO: 674 - DNA, 333 bp, Artificial Sequence
  846T.4F5 VL DNA sequence
gacattgtgctgacccaatctccagcttctttggctgtgtctctagggcagagggccaccatatcctgcagagccagtgaaagtgttgatagttatggcaatagttttatgcactggtaccagcagaaaccaggacagccacccaaactcctcatctatcttgcatccaacctagaatctggggtccctgccaggttcagtggcagtgggtctaggacagacttcaccctcaccattgatcctgtggaggctgatgatgctgcaacctattactgtcagcaaaataatgaggatccgtggacgttcggtggaggcaccaagctggaaatcaaa

SEQ ID NO: 675 - DNA, 324 bp, Artificial Sequence
  846T.8D1 VL DNA sequence
gacattgtgctgacacagtctcctgcttccttagctgtatctctggggcagagggccaccatctcatgcagggccagcaaaagtgtcagtacatctggctatagttatatgcactggtaccaacagaaaccaggacagccacccaaactcctcatctatcttgcatccatcctagaatctggggtccctgccaggttcagtggcagtgggtctgggacagacttcaccctcaacatccatcctgtggaggaggaggatgctgcaacctattactgtcagcacagtagggagcttcctctcacgttcggtgctgggaccaagctg

SEQ ID NO: 676 - DNA, 333 bp, Artificial Sequence
  847.10C9 VL DNA sequence
gatgttgtgatgacccagactccactcactttgtcggttaccattggacaaccagcctctatctcttgcaagtcaagtcagagcctcttatatagtgatggaaaaacctatttgaattggttattacagaggccaggccagtctccaaagcgcctaatctatctggtgtctcaactggactctggagtccctgacaggttcactggcagtggatcaggaacagattttacactgaaaatcagcagagtggaggctgatgatttgggagtttattgctgcgtgcaaggtacacatcttcccacgttcggaggggggaccaagctggaaataaaa

SEQ ID NO: 677 - DNA, 333 bp, Artificial Sequence
  847.11D6 VL DNA sequence
gacattgtgatgacacagtctcccgcttctttggctgtgtctctagggcagagggccaccatatcctgcagagccagtgaaagtgttgaaaatcatgtcaatagttttatgcactggttccaacagaaaccaggacagccacccaaactcctcatctatcgtgcatccaacctacaatctgggatccctgccaggttcagtggcagtgggtctaggacagacttcaccctcaccattaatcctgtggaggctgatgatgttgcaacctattactgtcagcaaaataatgaggtcccgtacacgttcggaggggggaccaagctggaaataaaa

SEQ ID NO: 678 - DNA, 327 bp, Artificial Sequence
  847.15D12 VL DNA sequence
caggctgttgtgactcaggaatctgcactcaccacatcacctggtgaaacagtcacactcacttgtcgctcaagtactggggctgttacaactagtaactatgccaactgggtccaagaaaaaccagatcatttattcactggtctaataggtggtaccaacaaccgagctccaggtgttcctgccagattctcaggctccctgattggagacaaggctgccctcaccatcacaggggcacagactgaggatgaggcaatatatttctgtgctctatggtacagcaaccatttggtgttcggtggaggaaccaaactgactgtccta

SEQ ID NO: 679 - DNA, 318 bp, Artificial Sequence
  847.15F9 VL DNA sequence
caaattgttctctcccagtctccagcaatcctgtctgcatctccaggggagaaggtcacaatgacttgcagggccagctcaagtgtaacttacatgtactggtaccagcagaagccaggatcctccccccaaccctggatttatgccacatccaacctggcttctggagtccctgctcgcttcagtggcagtgggtctgggacctcttactctctcacaatcagcagagtggaggctgaagatgctgccacttattactgccagcagtggagtagtaacccactcacgttcggtgctgggaccaagctggagctgaaa

SEQ ID NO: 680 - DNA, 333 bp, Artificial Sequence
  847.15H11 VL DNA sequence
gacattgtgctaacacagtctccagcttctttggctgtgtctctagggcagagggccaccatctcctgcagagccagcgaaagtcttgataattctggcattagttttatgaactggttccaacagagaccaggacagccacccaaactcctcatctatgctgcatccaacctagaatccggggtccctgccaggtttagtggcagtgggtctgggacagacttcagcctcaacatccatcctatggaggaggatgatgctgcaatgtatttctgtcagcacagtaaggaggttccgtggacgttcggtggaggcaccaagctggaaatcaaa

SEQ ID NO: 681 - DNA, 321 bp, Artificial Sequence
  847.20H7 VL DNA sequence
gacattgtgatgacccagtctcacaaaatcatgtccacatcagtaggagacagggtcagcatcacctgcaaggccagtcaggatgtgagtaccactgtggcctggtttcagcaaaaaccaggacaatctcctaaactactgctttactgggcatccacccggcacactggagtccctgatcgcttcacaggcagtggatctgggacagattatactctcaccatcagcagtgtccaggctgaagacctggcactttattactgtcagcaacattatagccctccattcacgttcggctcggggaccaagctggaaataaaa

SEQ ID NO: 682 - DNA, 321 bp, Artificial Sequence
  847.21B11 VL DNA sequence
gacattgtgatgactcagtctcaaaaattcatgtccacatcagtaggagacagggtcagcgtcacctgcaaggccagtcagaatgtgggtattaatgtagcctggtatcaacagaaaccagggcaatctcctaaagcactgatttactcggcatcctaccggtacagtggagtccctgatcgcttcacaggcagtggatctgggacagatttcactctcaccatcagcaatgtgcagtctgaagacttggcagagtatttctgtcagcaatataatagttatccgtacacgttcggaggggggaccaagctggaaatgaaa

SEQ ID NO: 683 - DNA, 336 bp, Artificial Sequence
  847.27B9 VL DNA sequence
gacgttgtgatgacccagactccactcactttgtcggttacccttggacaacccgcctccatctcttgcaggtcaagtcagagcctcttagatagtgatggaaagacatatttgaattggttgttacagaggccaggccagtctccaaagcgcctaatctatttggtgtctagactggactctggagtccctgacaggttcactggcagtggatcagggacagatttcacactgaaaatcagcagagtggaggctgaggatctgggagtttattattgctggcaaggtacacattttccgttcacgttcggaggggggaccaagctggaaataaaa

SEQ ID NO: 684 - DNA, 321 bp, Artificial Sequence
  847.28D1 VL DNA sequence
gacatccggatgactcagtctccagcctccctatctgcatctgtgggagaaactgtcaccatcacatgtcgagcaagtgggaatattcacaattatttagcatggtatcatcagaaacagggaaaatctcctcagctcctggtctataatgtaaaaaccttagcagatggtgtgccatcaaggttcagtggcagtggatcaggaacacaattttctctcaagatcaacagtttgcagcctgaagattttgggacttattattgtcaacatttttggagtatttttccgacgttcggtggaggcaccaagctggaaataaaa

SEQ ID NO: 685 - DNA, 318 bp, Artificial Sequence
  847.2B8 VL DNA sequence
caaattcttctctcccagtctccagcaatcctgtctgcatctccaggggagaaggtcacaatgacttgcagggccagctcaagtgtaacttacatgtactggtaccagcagaagccaggatcctccccccaaccctggatttatgccacatccaacctggcttctggagtccctgctcgcttcagtggcagtgggtctgggacctcttactctctcacaatcagcagagtggaggctgaagatgctgccacttattactgccagcagtggagtagtaacccactcacgttcggtgctgggaccaagctggagctgaaa

SEQ ID NO: 686 - DNA, 315 bp, Artificial Sequence
  847.3B3 VL DNA sequence
gacattttgatgactcagtctccagcctccctatctgcatctgtgggagaaactgtcaccatcacatgtcgagcaagtgggaatattcacaattatttagcatggtatcagcagaaacagggaaaatctcctcaactcctggtctatagtgcaaaaaccttagcagatggtgtgccatcaaggttcagtggcagtggatcaggaacacaattttctctcaagatcgacagcctgcagcctgaagattttgggacttattactgtcaacatttttggagtctttttccgacgttcggtggaggcaccaagctggaa

SEQ ID NO: 687 - DNA, 321 bp, Artificial Sequence
  849.1D2 VL DNA sequence
gacgttgtgatgacccagactcccaaattcctgcttgtatcagcaggagacagggttaccataacctgcaaggccagtcaaagtgtgagtagtgatgtagcttggtaccaacagaagccagggcagtctcctaaactgctgatatactttgcatccaatcgctacactggagtccctgatcgcttcactggcagtggatatgggacggatttcactttcaccatcagcactgtccaggctgaagacctggcagtttatttctgtcagcataattatatctctccgttcacgttcggaggggggaccaagctggaaataaaa

SEQ ID NO: 688 - DNA, 321 bp, Artificial Sequence
  849.2D7 VL DNA sequence
gacattgtgatgacccagtctcacaaattcatgtccacatcagtaggagacagggtcagcatcacctgcaaggccagtcaggatgtgagtactgctgtagcctggtatcaacaaaaaccagggcaatctcctaaactactgatttactgggcatccacccggcacactggagtccctgatcgcttcacaggcagtggatctgggacagattatactctcaccatcagcagtgtgcaggctgaagacctggcactttattactgtcagcaacattatagcactccgtacacgttcggaggggggaccaagctggaaataaaa

SEQ ID NO: 689 - DNA, 321 bp, Artificial Sequence
  849.2F12 VL DNA sequence
gacattgcgatgacccagtctcacaaattcatgtccacatcagtaggagacagggtcagcatcacctgcaaggccagtcaggatgtgagtactgctgtagcctggtatcaacaaaaaccagggcaatctcctaaactactgatttactgggcatccacccggcacactggagtccctgatcgcttcacaggcagtggatctgggacagattatactctcaccatcagcagtgtgcaggctgaagacctggcactttattactgtcagcaacattataacactccgtacacgttcggaggggggaccaagctggaaataaaa

SEQ ID NO: 690 - DNA, 336 bp, Artificial Sequence
  849.4B2 VL DNA sequence
gatgtggggatgacccagactccactcattttgtcggttaccattggacaaccagcttccatctcttgcaagtcaagtcagagcctcttatatattaatggaaaaacctatttgaattggttattacagaggccaggccagtctccaaaacgcctaatctatctggtgtctaaattggactctggagtccctaacagattcagtggcagtggatcagggacagatttcacactgaaaatcagcagagtggaggctgaggatttgggagtttattactgcttgcagagtacacattttcctcagacgttcggtggaggcaccaagctggaaatcaaa

SEQ ID NO: 691 - DNA, 321 bp, Artificial Sequence
  849.4F12 VL DNA sequence
gacatcctgctgacccagtctccatcctccatgtctgtatctctgggagacacagtcagcatcacttgccatgcaagtcagggcattaacagtaatatagggtggttgcagcagaaaccagggaagtcatttaagggcctgatctatcatggaaccaacttggaagatggagttccatcaaggttcagtggcagtggatctggagcagattattctctcaccatcagcagcctggaatctgaagattttgcggactattactgtgtacagtatgatcagtttccgtggacgttcggtggaggcaccaagctggaaatcaaa

SEQ ID NO: 692 - DNA, 336 bp, Artificial Sequence
  849.4F2 VL DNA sequence
gatgttgggatgacccagactccactcattttgtcggttaccattggacaaccagcttccatctcttgcaagtcaagtcagagcctcttatatattaatggaaaaacctatttgaattggttattacagaggccaggccagtctccaaaacgcctaatctatctggtgtctaaattggactctggagtccctaacagattcagtggcagtggatcagggacagatttcacactgaaaatcagcagagtggaggctgaggatttgggagtttattactgcttgcagagtacacattttcctcagacgttcggtggaggcaccaagctggaaatcaaa

SEQ ID NO: 693 - DNA, 336 bp, Artificial Sequence
  849.5C2 VL DNA sequence
gatattgtgatgactcaggctgcaccctctgtacctgtcactcctggagagtcagtatccatctcctgcaggtctagtaggagtctcctgcatagtaatggctacacttacttgtattggttcctgcagaggccaggccagtctcctcggctcctgatatatcggatgtccaaccttgcctcaggagtcccagacaggttcagtggcagtgggtcaggaactgctttcacactgagaatcagtagagtggaggctgaggatgtgggtgtttattactgtatgcaacatctagaatatccgtacacgttcggaggggggaccaagctggaaataaaa

SEQ ID NO: 694 - DNA, 318 bp, Artificial Sequence
  849.8D12 VL DNA sequence
gacatccagatgacacagactacatcctccctgtctgcctctctgggagacagagtcaccatcagttgcagtgcaagtcagggcattagcaattatttaaactggtatcagcagaaaccagatggaactgttaaactcctgatctattacacatcaagtttacactcaggagtcccatcaaggttcagtggcagtgggtctgggacagattattctctcaccatcagcaacctggaacctgaagatattgccacttactattgtcagcagtatagtaagcttcctcggacgttcggtggaggcaccaagctggaaatc

SEQ ID NO: 695 - DNA, 336 bp, Artificial Sequence
  F847C.21H6 VL DNA sequence
gatgttgtgatgacccagactccactcactttgtcggttaccattggacaaccagcctccatctcttgcaagtcaagtcggagcctcttagatagtgatggaaagacatatttgaattggttgttacagaggccaggccagtctccaaagcgcctaatctatctggtgtccaaactggactctggagtccctgacaggttcactggcagtggatcagggacagatttcacactgaaaatcagcagagtggaggctgaggatttgggagtttattattgctggcaaggtacacattttcctcagacgttcggtggaggcaccaagctggaaatcaat

SEQ ID NO: 696 - DNA, 321 bp, Artificial Sequence
  849.5H1 VL DNA sequence
gacatccagatgaaccagtctccatccagtctgtctgcatcccttggagacacaattaccatcacttgccatgccagtcagaacattaatgtttggttaagctggtaccagcagaaaccaggaaatattcctaaactattgatctatcaggcttccaacttacacacaggcgtcccatcaaggtttagtggccgtggatctggaacaggtttcacattaaccatcagcagcctgcagcctgaagacattgccacttactactgtcaacagggtcaaagttctccattcacgttcggctcggggacaaagttggaaataaaa

SEQ ID NO: 697 - DNA, 321 bp, Artificial Sequence
  847.23F11 VL DNA sequence
gacattttgatgacccagtctcacaaattcatgtccacatcagtaggagacagggtcagcatcacctgcaaggccagtcaggatgtgagttctgttgtagtctggtatcaacaaaaaccaggacaatctcctaaacaactaatttactgggcatccacccggcacactggagtccctgatcgcttcacaggcagtggatctgggacagattatactctcaccatcagcagtgtgcaggctgaagacctggcactttattactgtcagcaacattatagcacgccgtacacgttcggaggggggaccaagctggaaataaaa

SEQ ID NO: 698 - DNA, 327 bp, Artificial Sequence
  847.16D10 VL DNA sequence
caggctgttgtgactcaggaatctgcactcaccacatcacctggtgaaacagtcacactcacttgtcgctcaagtactggggctgttacaactagtaactatgccaactgggaccaagaaaaaccagatcatttattcactggtctaataggtggtaccaacaaccgagctccaggtgttcctgccagattctcaggctccctgattggagacaaggctgccctcaccatcacaggggcacagactgaggatgaggcaatatatttctgtgctctatggtacagcaaccatttggtgttcggtggaggaaccaaggtcactgtccta

SEQ ID NO: 699 - DNA, 333 bp, Artificial Sequence
  847.13E2-mH0mL1 VL DNA sequence
gacattgtgatgacacagtctcctgcttccttacctgtatctctggggcagagggccaccatctcatgcagggccagcaaaagtgtcactacatctgcctatagttatatacactggtaccaacagagaccaggacagccacccaaactcctcatctatcttgcatccaacctagaatctggggtccctgccaggttcagtggcagtgggtctgggacagacttcaccctcaacatccatcctgtggaggaggaggatgctgcaacctattactgtcagcacaatagggagcttcctccgacgttcggtggaggcaccaagctggaaatcaat

SEQ ID NO: 700 - DNA, 321 bp, Artificial Sequence
  847.13E2-mH0mL2 VL DNA sequence
gatattgtgctaactcagtctccagccaccctgtctgtgactccaggagatagcgtcagtttttcctgcagggccagccaaattattaacaacaacctacactggtatcaacaaaaatcacatgagtctcctaggcttctcatcaggtatacttcccagtccatctctgggatcccctccaggttcagtggcagtggatcagggacagatttcactctcagtatcaacaatgtggagactgaagattttggaatgtatttctgtcaacagactaacagctggcctctcacgttcggtgctgggaccaagctggagctgaaa

SEQ ID NO: 701 - DNA, 333 bp, Artificial Sequence
  847.12C4 VL DNA sequence
gatgttgtgatgacccagactccactcactttgtcggttaccattgaacaaacagcctccatctcttgcaagtcaagtcagagcctcttagatcgtgatggaaagacatatttgaattggttgttacagaggccaggccagtctccaaagcgcctaatctatctggtgtctaaactggactctggagtccctgacaggttcactggcagtggatcagggacagatttcacactgaaaatcagcagagtggaggctgaggatttgggagtttattattgctggcaaggtacacattttccgacgttcggtggaggcaccaagctggaaatcaaa

SEQ ID NO: 702 - DNA, 321 bp, Artificial Sequence
  847.4D3 VL DNA sequence
gatgttgtgatgacccaaactcccaaattcctgcctataacagcagaagacagggttaccattacctgcaaggccagtcagagtgtgagtaatgaagtagcttggtaccaacagaagccagggcagtctcctaaactgctgatatactatgcatccaatcgctacactggagtccctgatcgcttcactggcagtggatctggcacggatttcactttcaccatcagaagtgtgcaacttgaagacctggcagtttatttctgtcagcagcattatagctctccgtggacgttcggtggaggcaccaagctggaaatcaaa

SEQ ID NO: 703 - DNA, 1332 bp, Artificial Sequence
  TB001 heavy chain DNA sequence
caggtgcagctggtgcagtccggctccgagctgaaaaaacccggcgcctccgtgaaagtgtcctgcaaagcctccggctacacattcacaaactacggcatgaactgggtgaggcaggcccccggccagggcctgaaatggatgggctggatcaacacaaacacaggcgagcccacatacgtggaggagttcacaggcaggttcgtgttctccctggagacatccgtgtccacagcctacctgcagatctcctccctgaaagccgaggacacagccgtgtacttctgcgccccctacgacaacttcttcgcctactggggccagggcacaacagtgacagtgtcctccgcttccaccaagggacccagcgtgttccctctggctccttgctccagatccacctccgagtctacagctgctctgggctgcctggtcaaggactactttcctgagcctgtgaccgtgtcctggaactctggcgctctgacatctggcgtgcacacctttccagctgtgctgcagtcctccggcctgtactctctgtcctctgtcgtgaccgtgccttcctctagcctgggcaccaagacctacacctgtaatgtggaccacaagccttccaacaccaaggtggacaagcgcgtggaatctaagtacggccctccttgtcctccatgtcctgctccagagtttctcggcggaccctccgtgttcctgtttcctccaaagcctaaggacaccctgatgatctctcggacccctgaagtgacctgcgtggtggtggatgtgtcccaagaggatcccgaggtgcagttcaattggtacgtggacggcgtggaagtgcacaacgccaagaccaagcctagagaggaacagttcaactccacctacagagtggtgtccgtgctgaccgtgctgcaccaggattggctgaacggcaaagagtacaagtgcaaggtgtccaacaagggcctgccttccagcatcgaaaagaccatctccaaggccaagggccagcctagggaaccccaggtttacaccctgcctccaagccaagaggaaatgaccaagaaccaggtgtccctgacctgcctcgtgaagggcttctacccttccgatatcgccgtggaatgggagagcaatggccagcctgagaacaactacaagacaacccctcctgtgctggactccgacggcagcttcttcctgtattcccgcctgaccgtggacaagtccagatggcaagagggcaacgtgttcagctgctccgtgatgcacgaggccctgcacaatcactacacccagaagtccctgtctctgtccctgggctgatga

SEQ ID NO: 704 - DNA, 1341 bp, Artificial Sequence
  TB006 heavy chain DNA sequence
cagattcaattggttcagagcggctcagaactgaaaaagcctggagccagcgttaaagtgagctgtaaagccagtggatacacattcaccacttacgtcatgtcctgggttagacaggcccctggacaggggctggaatggatgggctggataaacactcactctggagtgcccacatacgccgacgactttacaggcaggttcgtgttttccctagatactagtgtgaatactgcatacttgcaaatctcttctctgaaagcagaggataccgccgtgtacttttgcacccgcgatgggaatgatggggatgccatggacaactggggccaggggacgactgtgacagtgtcttcagctagcaccaagggccccagcgtgtttcctctcgctccctgcagccggagcacatccgagagcaccgctgctctgggctgtctcgtgaaggactacttccctgaacccgtcaccgtcagctggaatagcggcgccctgacatccggcgtccacacattccccgctgtcctgcagagcagcggcctgtacagcctgagctccgtggtcaccgtgcctagcagcagcctgggaacaaagacctacacctgcaacgtggaccataagccctccaacaccaaggtggacaagcgggtggaatccaagtatggacccccctgtcctccttgccctgctcctgaatttctcggaggcccctccgtcttcctgtttccccccaagcccaaggacaccctgatgatctcccggacacccgaagtcacctgcgtcgtggtggatgtcagccaggaagatcccgaggtgcagttcaactggtacgtggacggagtggaggtgcataacgccaaaaccaagcccagggaagagcagttcaacagcacctatcgggtcgtgtccgtgctcaccgtcctgcatcaggattggctcaacggcaaggagtacaagtgcaaggtgtccaacaagggcctgccctcctccatcgagaagaccatctccaaggctaagggccaacctcgggagccccaagtgtataccctccctcccagccaggaggagatgaccaagaatcaagtgagcctgacctgcctcgtgaagggattttacccctccgacatcgctgtggaatgggaaagcaatggccaacctgagaacaactacaagaccacaccccccgtgctggactccgatggctccttcttcctgtacagcaggctgaccgtggacaaatcccggtggcaagagggaaacgtgttcagctgctccgtgatgcacgaggctctccacaaccactacacccagaagagcctctccctgagcctcggctagtaa

SEQ ID NO: 705 - DNA, 1350 bp, Artificial Sequence
  12G5.D7 heavy chain DNA sequence
caggtgcagctgaagcagtctggggctgagctggtgaggcctggggcttcagtgaagctgtcctgcaaggcttctggctacactttcactgactactatataaactgggtgaagcagaggcctggacagggacttgagtggattgcaaggatttatcctggaactggtaatactgactacaatgagaagttcaagggcagggccacactgactgcagaaaactcctccagcactgcctacatgcagctcagcagtctgacatctgaggactctgctgtctatttctgtgcaagatttgcgtattactacggtagtggagggtactttgactactggggccacggcaccactctcacagtctcctcagctagcaccaagggccccagcgtgtttcctctcgctccctgcagccggagcacatccgagagcaccgctgctctgggctgtctcgtgaaggactacttccctgaacccgtcaccgtcagctggaatagcggcgccctgacatccggcgtccacacattccccgctgtcctgcagagcagcggcctgtacagcctgagctccgtggtcaccgtgcctagcagcagcctgggaacaaagacctacacctgcaacgtggaccataagccctccaacaccaaggtggacaagcgggtggaatccaagtatggacccccctgtcctccttgccctgctcctgaatttctcggaggcccctccgtcttcctgtttccccccaagcccaaggacaccctgatgatctcccggacacccgaagtcacctgcgtcgtggtggatgtcagccaggaagatcccgaggtgcagttcaactggtacgtggacggagtggaggtgcataacgccaaaaccaagcccagggaagagcagttcaacagcacctatcgggtcgtgtccgtgctcaccgtcctgcatcaggattggctcaacggcaaggagtacaagtgcaaggtgtccaacaagggcctgccctcctccatcgagaagaccatctccaaggctaagggccaacctcgggagccccaagtgtataccctccctcccagccaggaggagatgaccaagaatcaagtgagcctgacctgcctcgtgaagggattttacccctccgacatcgctgtggaatgggaaagcaatggccaacctgagaacaactacaagaccacaccccccgtgctggactccgatggctccttcttcctgtacagcaggctgaccgtggacaaatcccggtggcaagagggaaacgtgttcagctgctccgtgatgcacgaggctctccacaaccactacacccagaagagcctctccctgagcctcggctagtaa

SEQ ID NO: 706 - DNA, 1341 bp, Artificial Sequence
  13A12.2E5 heavy chain DNA sequence
cagatccagttggtacagtctggacctgagctgaagaagcctggagagacagtcaagatctcctgcaagacttctgggtataaattcaaaacctatgtgatgagctgggtgaaacaggctccaggaaaggctttaaagtggatgggctggataaacacctactctggagtgccaacatatgctgatgacttcaagggacgatttgccttctctttggaaacctctgccagcactgcctatttggagatcatcaacctcaaaaatgaggacacggctacatatttctgtgcaagagatggtaactacggggatcctatggactactggggtcaaggaacctcagtcaccgtctcctcagctagcaccaagggccccagcgtgtttcctctcgctccctgcagccggagcacatccgagagcaccgctgctctgggctgtctcgtgaaggactacttccctgaacccgtcaccgtcagctggaatagcggcgccctgacatccggcgtccacacattccccgctgtcctgcagagcagcggcctgtacagcctgagctccgtggtcaccgtgcctagcagcagcctgggaacaaagacctacacctgcaacgtggaccataagccctccaacaccaaggtggacaagcgggtggaatccaagtatggacccccctgtcctccttgccctgctcctgaatttctcggaggcccctccgtcttcctgtttccccccaagcccaaggacaccctgatgatctcccggacacccgaagtcacctgcgtcgtggtggatgtcagccaggaagatcccgaggtgcagttcaactggtacgtggacggagtggaggtgcataacgccaaaaccaagcccagggaagagcagttcaacagcacctatcgggtcgtgtccgtgctcaccgtcctgcatcaggattggctcaacggcaaggagtacaagtgcaaggtgtccaacaagggcctgccctcctccatcgagaagaccatctccaaggctaagggccaacctcgggagccccaagtgtataccctccctcccagccaggaggagatgaccaagaatcaagtgagcctgacctgcctcgtgaagggattttacccctccgacatcgctgtggaatgggaaagcaatggccaacctgagaacaactacaagaccacaccccccgtgctggactccgatggctccttcttcctgtacagcaggctgaccgtggacaaatcccggtggcaagagggaaacgtgttcagctgctccgtgatgcacgaggctctccacaaccactacacccagaagagcctctccctgagcctcggctagtaa

SEQ ID NO: 707 - DNA, 1335 bp, Artificial Sequence
  14H10.2C9 heavy chain DNA sequence
cagatccagttggtacagtctggacctgagctgaagaagcctggagagacagtcaagatctcctgcaaggcttctgggtataccttcacaacctatggaatgggctgggtgaaacaggctccaggaaaggatttaaagtggatgggctggataaacacctactctggagtgccaacatatgctgatgacttcaagggacggtttgccttctctttggaaacctctgccagcactgcctatttgcagatcagcaacctcaaaaatgaagacacggctacatatttctgttcaaccccttatgaatacgacggggcttactggggccaggggactctggtcactgtctctgcagctagcaccaagggccccagcgtgtttcctctcgctccctgcagccggagcacatccgagagcaccgctgctctgggctgtctcgtgaaggactacttccctgaacccgtcaccgtcagctggaatagcggcgccctgacatccggcgtccacacattccccgctgtcctgcagagcagcggcctgtacagcctgagctccgtggtcaccgtgcctagcagcagcctgggaacaaagacctacacctgcaacgtggaccataagccctccaacaccaaggtggacaagcgggtggaatccaagtatggacccccctgtcctccttgccctgctcctgaatttctcggaggcccctccgtcttcctgtttccccccaagcccaaggacaccctgatgatctcccggacacccgaagtcacctgcgtcgtggtggatgtcagccaggaagatcccgaggtgcagttcaactggtacgtggacggagtggaggtgcataacgccaaaaccaagcccagggaagagcagttcaacagcacctatcgggtcgtgtccgtgctcaccgtcctgcatcaggattggctcaacggcaaggagtacaagtgcaaggtgtccaacaagggcctgccctcctccatcgagaagaccatctccaaggctaagggccaacctcgggagccccaagtgtataccctccctcccagccaggaggagatgaccaagaatcaagtgagcctgacctgcctcgtgaagggattttacccctccgacatcgctgtggaatgggaaagcaatggccaacctgagaacaactacaagaccacaccccccgtgctggactccgatggctccttcttcctgtacagcaggctgaccgtggacaaatcccggtggcaagagggaaacgtgttcagctgctccgtgatgcacgaggctctccacaaccactacacccagaagagcctctccctgagcctcggctagtaa

SEQ ID NO: 708 - DNA, 1323 bp, Artificial Sequence
  15F10.2D6 heavy chain DNA sequence
gaagtacagctggtggagtctgggggaggcttagtgaagcctggagggtccctgaaactctcctgtgcagcctctggattcgctttcagttcctatgccatgtcttgggttcgccagactccggaaaagaggctggagtgggtcgcaaccattagtgatggtggtgtttacacctactatacagaccatgtaaagggccgattcaccatctccagagacaatgccgaggacaacctgtacctgcaaatgagccatctgaagtctgaggacacagccatgtattattgtgtgagagatgggggctactggggccaaggcaccactctcacagtctcctcagctagcaccaagggccccagcgtgtttcctctcgctccctgcagccggagcacatccgagagcaccgctgctctgggctgtctcgtgaaggactacttccctgaacccgtcaccgtcagctggaatagcggcgccctgacatccggcgtccacacattccccgctgtcctgcagagcagcggcctgtacagcctgagctccgtggtcaccgtgcctagcagcagcctgggaacaaagacctacacctgcaacgtggaccataagccctccaacaccaaggtggacaagcgggtggaatccaagtatggacccccctgtcctccttgccctgctcctgaatttctcggaggcccctccgtcttcctgtttccccccaagcccaaggacaccctgatgatctcccggacacccgaagtcacctgcgtcgtggtggatgtcagccaggaagatcccgaggtgcagttcaactggtacgtggacggagtggaggtgcataacgccaaaaccaagcccagggaagagcagttcaacagcacctatcgggtcgtgtccgtgctcaccgtcctgcatcaggattggctcaacggcaaggagtacaagtgcaaggtgtccaacaagggcctgccctcctccatcgagaagaccatctccaaggctaagggccaacctcgggagccccaagtgtataccctccctcccagccaggaggagatgaccaagaatcaagtgagcctgacctgcctcgtgaagggattttacccctccgacatcgctgtggaatgggaaagcaatggccaacctgagaacaactacaagaccacaccccccgtgctggactccgatggctccttcttcctgtacagcaggctgaccgtggacaaatcccggtggcaagagggaaacgtgttcagctgctccgtgatgcacgaggctctccacaaccactacacccagaagagcctctccctgagcctcggctagtaa

SEQ ID NO: 709 - DNA, 1332 bp, Artificial Sequence
  19B5.2E6 heavy chain DNA sequence
cagatccaacttgttcagagcgggcctgaattgaagaaaccaggcgagactgtaaagatctcctgtaaggccagtggctatacattcaccacctacgcaatgagctgggtcaagcaggcacccggaaagggtctgaagtggatgggttggataaatacatactcaggcgtcccaacctacgctgatgatttgaaggggcgctttgccttttctcttgaaacctcagcatcaaccgcctacttgcagataaataacctcaaaaatgaagacaccgctacctatttctgcgcaagggggccttatgctatggactactggggccagggcacctctgtgactgtaagttctgctagcaccaagggccccagcgtgtttcctctcgctccctgcagccggagcacatccgagagcaccgctgctctgggctgtctcgtgaaggactacttccctgaacccgtcaccgtcagctggaatagcggcgccctgacatccggcgtccacacattccccgctgtcctgcagagcagcggcctgtacagcctgagctccgtggtcaccgtgcctagcagcagcctgggaacaaagacctacacctgcaacgtggaccataagccctccaacaccaaggtggacaagcgggtggaatccaagtatggacccccctgtcctccttgccctgctcctgaatttctcggaggcccctccgtcttcctgtttccccccaagcccaaggacaccctgatgatctcccggacacccgaagtcacctgcgtcgtggtggatgtcagccaggaagatcccgaggtgcagttcaactggtacgtggacggagtggaggtgcataacgccaaaaccaagcccagggaagagcagttcaacagcacctatcgggtcgtgtccgtgctcaccgtcctgcatcaggattggctcaacggcaaggagtacaagtgcaaggtgtccaacaagggcctgccctcctccatcgagaagaccatctccaaggctaagggccaacctcgggagccccaagtgtataccctccctcccagccaggaggagatgaccaagaatcaagtgagcctgacctgcctcgtgaagggattttacccctccgacatcgctgtggaatgggaaagcaatggccaacctgagaacaactacaagaccacaccccccgtgctggactccgatggctccttcttcctgtacagcaggctgaccgtggacaaatcccggtggcaagagggaaacgtgttcagctgctccgtgatgcacgaggctctccacaaccactacacccagaagagcctctccctgagcctcggctagtaa

SEQ ID NO: 710 - DNA, 1329 bp, Artificial Sequence
  20D11.2C6 heavy chain DNA sequence
gaggtccagctgcaacaatctggacctgaactggtgaagcctggggcttcagtgaagatatcctgtaaggcttctggatacacgttcactgacttctacataaactgggtgaagcagagccatggaaagagccttgagtggattggagatattaatcctaagaatggtggtattaactacaacccgaagttcaagatcaaggccacattgactgtagacaagtcctccagcacatcctacatggacctccgcggcctgacatctgaggactctgcagtctattactgcacctcaggctacggatttccttactggggccaagggactctggtcactgtctctgcagctagcaccaagggccccagcgtgtttcctctcgctccctgcagccggagcacatccgagagcaccgctgctctgggctgtctcgtgaaggactacttccctgaacccgtcaccgtcagctggaatagcggcgccctgacatccggcgtccacacattccccgctgtcctgcagagcagcggcctgtacagcctgagctccgtggtcaccgtgcctagcagcagcctgggaacaaagacctacacctgcaacgtggaccataagccctccaacaccaaggtggacaagcgggtggaatccaagtatggacccccctgtcctccttgccctgctcctgaatttctcggaggcccctccgtcttcctgtttccccccaagcccaaggacaccctgatgatctcccggacacccgaagtcacctgcgtcgtggtggatgtcagccaggaagatcccgaggtgcagttcaactggtacgtggacggagtggaggtgcataacgccaaaaccaagcccagggaagagcagttcaacagcacctatcgggtcgtgtccgtgctcaccgtcctgcatcaggattggctcaacggcaaggagtacaagtgcaaggtgtccaacaagggcctgccctcctccatcgagaagaccatctccaaggctaagggccaacctcgggagccccaagtgtataccctccctcccagccaggaggagatgaccaagaatcaagtgagcctgacctgcctcgtgaagggattttacccctccgacatcgctgtggaatgggaaagcaatggccaacctgagaacaactacaagaccacaccccccgtgctggactccgatggctccttcttcctgtacagcaggctgaccgtggacaaatcccggtggcaagagggaaacgtgttcagctgctccgtgatgcacgaggctctccacaaccactacacccagaagagcctctccctgagcctcggctagtaa

SEQ ID NO: 711 - DNA, 1344 bp, Artificial Sequence
  20H5.A3 heavy chain DNA sequence
cagatccagttggtacagtctggacctgagctgaagaagcctggagagtcagtcaagatctcctgcaaggcttctggttatgccttcacaacctatggaatgagctgggtgcaacaggctccaggaaagggtttaaagtggatgggctgggtaaacacctactctggagtgccaacatgtgctgatgacttcaagggacggtttgccttctctttggaaacctctgccagcactgcctatttgcagatcaacaacctcagaaatgaggacacggctacatatttctgtgcaagagggccctatgctatggactactggggtcaaggaacctcagtcaccgtctcctcagctaagactactcctcccagtgtctaccccctggcccccgtgtgcggcgacacaacaggctcctccgtgacactgggctgcctggtgaaaggctacttccccgagcccgtgacactgacatggaactccggctccctgtcctccggcgtgcacacattccccgccgtgctgcagtccgacctgtacacactgtcctcctccgtgacagtgacatcctccacatggccctcccagtccatcacatgcaacgtggcccaccccgcctcctccacaaaagtggacaaaaaaatcgagcccaggggccccacaatcaaaccctgccccccctgcaaatgccccgcccccaacgccgccggcggcccctccgtgttcatcttcccccccaaaatcaaagacgtgctgatgatctccctgtcccccatcgtgacatgcgtggtggtggacgtgtccgaggacgaccccgacgtgcagatctcctggttcgtgaacaacgtggaggtgcacacagcccagacacagacacacagggaggactacaactccacactgagggtggtgtccgccctgcccatccagcaccaggactggatgtccggcaaagagttcaaatgcaaagtgaacaacaaagacctgggcgcccccatcgagaggacaatctccaaacccaaaggctccgtgagggccccccaggtgtacgtgctgcccccccccgaggaggagatgacaaaaaaacaggtgacactgacatgcatggtgacagacttcatgcccgaggacatctacgtggagtggacaaacaacggcaaaacagagctgaactacaaaaacacagagcccgtgctggactccgacggctcctacttcatgtactccaaactgagggtggagaaaaaaaactgggtggagaggaactcctactcctgctccgtggtgcacgagggcctgcacaaccaccacacaacaaaatccttctccaggacacccggcaaatagtaa

SEQ ID NO: 712 - DNA, 1332 bp, Artificial Sequence
  23H9.2E4 heavy chain DNA sequence
cagatccagttggtacagtctggacctgagctgaagaagcctggagagacagtcaagatctcctgcaaggcttctgggtataccttcacaacctatgcaatgagctgggtgaaacaggctccaggaaagggtttaaagtggatgggctggataaacacctactctggagtgccaacatatgctgatgacctcaagggacggtttgccttctctttggaaacctctgccagcactgcctatttgcagatcaacaacctcaaaaatgaggacacggctacatatttctgtgcaagagggccctatgctatggactactggggtcaaggaacctcagtcaccgtctcctcagctagcaccaagggccccagcgtgtttcctctcgctccctgcagccggagcacatccgagagcaccgctgctctgggctgtctcgtgaaggactacttccctgaacccgtcaccgtcagctggaatagcggcgccctgacatccggcgtccacacattccccgctgtcctgcagagcagcggcctgtacagcctgagctccgtggtcaccgtgcctagcagcagcctgggaacaaagacctacacctgcaacgtggaccataagccctccaacaccaaggtggacaagcgggtggaatccaagtatggacccccctgtcctccttgccctgctcctgaatttctcggaggcccctccgtcttcctgtttccccccaagcccaaggacaccctgatgatctcccggacacccgaagtcacctgcgtcgtggtggatgtcagccaggaagatcccgaggtgcagttcaactggtacgtggacggagtggaggtgcataacgccaaaaccaagcccagggaagagcagttcaacagcacctatcgggtcgtgtccgtgctcaccgtcctgcatcaggattggctcaacggcaaggagtacaagtgcaaggtgtccaacaagggcctgccctcctccatcgagaagaccatctccaaggctaagggccaacctcgggagccccaagtgtataccctccctcccagccaggaggagatgaccaagaatcaagtgagcctgacctgcctcgtgaagggattttacccctccgacatcgctgtggaatgggaaagcaatggccaacctgagaacaactacaagaccacaccccccgtgctggactccgatggctccttcttcctgtacagcaggctgaccgtggacaaatcccggtggcaagagggaaacgtgttcagctgctccgtgatgcacgaggctctccacaaccactacacccagaagagcctctccctgagcctcggctagtaa

SEQ ID NO: 713 - DNA, 1344 bp, Artificial Sequence
  2D10-VH0-VL0 heavy chain DNA sequence
cagtttcagcttcaacagtctggtcctgaactcgtaaagcctggggccagtgtaaaaatatcctgtaaggcatcaggatacactttcaccgattactacatcaactgggtaaagcagcgacctggtcagggactggagtggattggctggatctaccccggatcaaatgacaccaaatacaatgagaagttcaagggcaaagctacccttacagtcgatacctcctcctccaccgcatatatgcaacttgggtcactgacttcagaggattctgcagtctatttttgcgctaattactttggatgcagcggctggtttttcgacgtgtggggaaccggaaccacagtgacagtatcctctgctagcaccaagggccccagcgtgtttcctctcgctccctgcagccggagcacatccgagagcaccgctgctctgggctgtctcgtgaaggactacttccctgaacccgtcaccgtcagctggaatagcggcgccctgacatccggcgtccacacattccccgctgtcctgcagagcagcggcctgtacagcctgagctccgtggtcaccgtgcctagcagcagcctgggaacaaagacctacacctgcaacgtggaccataagccctccaacaccaaggtggacaagcgggtggaatccaagtatggacccccctgtcctccttgccctgctcctgaatttctcggaggcccctccgtcttcctgtttccccccaagcccaaggacaccctgatgatctcccggacacccgaagtcacctgcgtcgtggtggatgtcagccaggaagatcccgaggtgcagttcaactggtacgtggacggagtggaggtgcataacgccaaaaccaagcccagggaagagcagttcaacagcacctatcgggtcgtgtccgtgctcaccgtcctgcatcaggattggctcaacggcaaggagtacaagtgcaaggtgtccaacaagggcctgccctcctccatcgagaagaccatctccaaggctaagggccaacctcgggagccccaagtgtataccctccctcccagccaggaggagatgaccaagaatcaagtgagcctgacctgcctcgtgaagggattttacccctccgacatcgctgtggaatgggaaagcaatggccaacctgagaacaactacaagaccacaccccccgtgctggactccgatggctccttcttcctgtacagcaggctgaccgtggacaaatcccggtggcaagagggaaacgtgttcagctgctccgtgatgcacgaggctctccacaaccactacacccagaagagcctctccctgagcctcggctagtaa

SEQ ID NO: 714 - DNA, 1341 bp, Artificial Sequence
  3B11.2G2 heavy chain DNA sequence
cagatccagttggtacagtctggacctgagctgaagaagcctggagagacagtcaagatctcctgcaagacttctgggtataaattcaaaacctatgtaatgagctgggtgaaacaggctccaggaaaggctttaaagtggatgggctggataaacacctactctggagtgccaacatatgctgatgacttcaagggacggtttgccttctctttggaaacctctgccagcactgcctatttggagatcatcaacctcaaaaatgaggacacggctacatatttctgtgcaagagatggtaattacggggatcctatggactactggggtcaaggaacctcagtcaccgtctcctcagctagcaccaagggccccagcgtgtttcctctcgctccctgcagccggagcacatccgagagcaccgctgctctgggctgtctcgtgaaggactacttccctgaacccgtcaccgtcagctggaatagcggcgccctgacatccggcgtccacacattccccgctgtcctgcagagcagcggcctgtacagcctgagctccgtggtcaccgtgcctagcagcagcctgggaacaaagacctacacctgcaacgtggaccataagccctccaacaccaaggtggacaagcgggtggaatccaagtatggacccccctgtcctccttgccctgctcctgaatttctcggaggcccctccgtcttcctgtttccccccaagcccaaggacaccctgatgatctcccggacacccgaagtcacctgcgtcgtggtggatgtcagccaggaagatcccgaggtgcagttcaactggtacgtggacggagtggaggtgcataacgccaaaaccaagcccagggaagagcagttcaacagcacctatcgggtcgtgtccgtgctcaccgtcctgcatcaggattggctcaacggcaaggagtacaagtgcaaggtgtccaacaagggcctgccctcctccatcgagaagaccatctccaaggctaagggccaacctcgggagccccaagtgtataccctccctcccagccaggaggagatgaccaagaatcaagtgagcctgacctgcctcgtgaagggattttacccctccgacatcgctgtggaatgggaaagcaatggccaacctgagaacaactacaagaccacaccccccgtgctggactccgatggctccttcttcctgtacagcaggctgaccgtggacaaatcccggtggcaagagggaaacgtgttcagctgctccgtgatgcacgaggctctccacaaccactacacccagaagagcctctccctgagcctcggctagtaa

SEQ ID NO: 715 - DNA, 1323 bp, Artificial Sequence
  7D8.2D8 heavy chain DNA sequence
gaagtgcagctggtggagtctgggggaggcttagtgaagcctggagggtccctgaaactctcctgtgcagcctctggattcactttcagtagctatgccatgtcttgggttcgccagactccggaaaagaggctggagtgggtcgcaaccatcagtgatggtggtatttacacctactatccagacaatgtaaagggccgattcaccatttccagagacaatgccaagaacaacctgttcctgcaaatgagccatctgaagtctgaggatacagccatgtattactgtgtaagagatgggggctactggggccaaggcaccactctcacagtctcctcagctagcaccaagggccccagcgtgtttcctctcgctccctgcagccggagcacatccgagagcaccgctgctctgggctgtctcgtgaaggactacttccctgaacccgtcaccgtcagctggaatagcggcgccctgacatccggcgtccacacattccccgctgtcctgcagagcagcggcctgtacagcctgagctccgtggtcaccgtgcctagcagcagcctgggaacaaagacctacacctgcaacgtggaccataagccctccaacaccaaggtggacaagcgggtggaatccaagtatggacccccctgtcctccttgccctgctcctgaatttctcggaggcccctccgtcttcctgtttccccccaagcccaaggacaccctgatgatctcccggacacccgaagtcacctgcgtcgtggtggatgtcagccaggaagatcccgaggtgcagttcaactggtacgtggacggagtggaggtgcataacgccaaaaccaagcccagggaagagcagttcaacagcacctatcgggtcgtgtccgtgctcaccgtcctgcatcaggattggctcaacggcaaggagtacaagtgcaaggtgtccaacaagggcctgccctcctccatcgagaagaccatctccaaggctaagggccaacctcgggagccccaagtgtataccctccctcccagccaggaggagatgaccaagaatcaagtgagcctgacctgcctcgtgaagggattttacccctccgacatcgctgtggaatgggaaagcaatggccaacctgagaacaactacaagaccacaccccccgtgctggactccgatggctccttcttcctgtacagcaggctgaccgtggacaaatcccggtggcaagagggaaacgtgttcagctgctccgtgatgcacgaggctctccacaaccactacacccagaagagcctctccctgagcctcggctagtaa

SEQ ID NO: 716 - DNA, 1344 bp, Artificial Sequence
  mIMT001 heavy chain DNA sequence
cagatccaacttgtgcagtcaggtccagaattgaagaagcctggtgagaccgtcaagatttcctgtaaggcctctggttatacttttaccaactatggcatgaattgggtcaagcaggcacctgggaagggtttgaaatggatggggtggataaataccaacacaggggaaccaacttacgttgaagagtttaagggtcgttttgcattcagtcttgagacttctgcaagcacagcttacctccaaattaacaatctcaaaaatgaagatactgctacatatttctgtgctccttatgataattttttcgcctactggggacagggaactctggtcaccgtctcagcagctaagactactcctcccagtgtctaccccctggcccccgtgtgcggcgacacaacaggctcctccgtgacactgggctgcctggtgaaaggctacttccccgagcccgtgacactgacatggaactccggctccctgtcctccggcgtgcacacattccccgccgtgctgcagtccgacctgtacacactgtcctcctccgtgacagtgacatcctccacatggccctcccagtccatcacatgcaacgtggcccaccccgcctcctccacaaaagtggacaaaaaaatcgagcccaggggccccacaatcaaaccctgccccccctgcaaatgccccgcccccaacgccgccggcggcccctccgtgttcatcttcccccccaaaatcaaagacgtgctgatgatctccctgtcccccatcgtgacatgcgtggtggtggacgtgtccgaggacgaccccgacgtgcagatctcctggttcgtgaacaacgtggaggtgcacacagcccagacacagacacacagggaggactacaactccacactgagggtggtgtccgccctgcccatccagcaccaggactggatgtccggcaaagagttcaaatgcaaagtgaacaacaaagacctgggcgcccccatcgagaggacaatctccaaacccaaaggctccgtgagggccccccaggtgtacgtgctgcccccccccgaggaggagatgacaaaaaaacaggtgacactgacatgcatggtgacagacttcatgcccgaggacatctacgtggagtggacaaacaacggcaaaacagagctgaactacaaaaacacagagcccgtgctggactccgacggctcctacttcatgtactccaaactgagggtggagaaaaaaaactgggtggagaggaactcctactcctgctccgtggtgcacgagggcctgcacaaccaccacacaacaaaatccttctccaggacacccggcaaatagtaa

SEQ ID NO: 717 - DNA, 1332 bp, Artificial Sequence
  4A11.2B5 heavy chain DNA sequence
caggtacaacttcagcagagcggtccagaacttgtgaagcccggtgctagtgtcaaaatatcttgcaaagcaagtggttattccttcaccaactattacatacactgggtaaaacaacgtccagggcaaggactcgaatggattggttggatctaccccggcagcggcaacactaactacaacgagaagtttaaaggcaaagctactctcacagcagacacttctagcagtacaacaaatatgcagttgtcctctctgacttccgaagacagcgccgtctattactgttctactgcacccggaggttttgacgtctggggttccggcaccacagttaccgttagttccgctagcaccaagggccccagcgtgtttcctctcgctccctgcagccggagcacatccgagagcaccgctgctctgggctgtctcgtgaaggactacttccctgaacccgtcaccgtcagctggaatagcggcgccctgacatccggcgtccacacattccccgctgtcctgcagagcagcggcctgtacagcctgagctccgtggtcaccgtgcctagcagcagcctgggaacaaagacctacacctgcaacgtggaccataagccctccaacaccaaggtggacaagcgggtggaatccaagtatggacccccctgtcctccttgccctgctcctgaatttctcggaggcccctccgtcttcctgtttccccccaagcccaaggacaccctgatgatctcccggacacccgaagtcacctgcgtcgtggtggatgtcagccaggaagatcccgaggtgcagttcaactggtacgtggacggagtggaggtgcataacgccaaaaccaagcccagggaagagcagttcaacagcacctatcgggtcgtgtccgtgctcaccgtcctgcatcaggattggctcaacggcaaggagtacaagtgcaaggtgtccaacaagggcctgccctcctccatcgagaagaccatctccaaggctaagggccaacctcgggagccccaagtgtataccctccctcccagccaggaggagatgaccaagaatcaagtgagcctgacctgcctcgtgaagggattttacccctccgacatcgctgtggaatgggaaagcaatggccaacctgagaacaactacaagaccacaccccccgtgctggactccgatggctccttcttcctgtacagcaggctgaccgtggacaaatcccggtggcaagagggaaacgtgttcagctgctccgtgatgcacgaggctctccacaaccactacacccagaagagcctctccctgagcctcggctagtaa

SEQ ID NO: 718 - DNA, 1332 bp, Artificial Sequence
  4A11.H1L1 heavy chain DNA sequence
caggtgcagctggtgcaatcaggagccgaagttaagaagcctggcgccagcgtcaaggtctcatgtaaagcctccggttacagtttcaccaactactatatgcactgggttaggcaagcaccaggccaggggcttgagtggatgggatggatctatccagggagcggtaacaccaattacaatgagaagtttcaagggcgcgtaaccatgacagcagataccagtataagcaccgcctatatggaactctctcggttgagatccgatgataccgctgtttattactgctctaccgcacctggtggtttcgacgtttggggccaaggtactacagtgaccgtatcatcagctagcaccaagggccccagcgtgtttcctctcgctccctgcagccggagcacatccgagagcaccgctgctctgggctgtctcgtgaaggactacttccctgaacccgtcaccgtcagctggaatagcggcgccctgacatccggcgtccacacattccccgctgtcctgcagagcagcggcctgtacagcctgagctccgtggtcaccgtgcctagcagcagcctgggaacaaagacctacacctgcaacgtggaccataagccctccaacaccaaggtggacaagcgggtggaatccaagtatggacccccctgtcctccttgccctgctcctgaatttctcggaggcccctccgtcttcctgtttccccccaagcccaaggacaccctgatgatctcccggacacccgaagtcacctgcgtcgtggtggatgtcagccaggaagatcccgaggtgcagttcaactggtacgtggacggagtggaggtgcataacgccaaaaccaagcccagggaagagcagttcaacagcacctatcgggtcgtgtccgtgctcaccgtcctgcatcaggattggctcaacggcaaggagtacaagtgcaaggtgtccaacaagggcctgccctcctccatcgagaagaccatctccaaggctaagggccaacctcgggagccccaagtgtataccctccctcccagccaggaggagatgaccaagaatcaagtgagcctgacctgcctcgtgaagggattttacccctccgacatcgctgtggaatgggaaagcaatggccaacctgagaacaactacaagaccacaccccccgtgctggactccgatggctccttcttcctgtacagcaggctgaccgtggacaaatcccggtggcaagagggaaacgtgttcagctgctccgtgatgcacgaggctctccacaaccactacacccagaagagcctctccctgagcctcggctagtaa

SEQ ID NO: 719 - DNA, 1332 bp, Artificial Sequence
  4A11.H4L2 heavy chain DNA sequence
caggtgcaactggtccagtctggggccgaggtcaaaaagcctggagcctccgtcaaagtgtcatgtaaagcctcagggtatagtttcaccaactactatatacattgggtcagacaagccccaggccagcgtcttgagtggatgggatggatttatcccggatcagggaatacaaactataacgagaaatttcaaggcagagttactctcactgccgatacctctgcaagtactacctatatggagctctccagtctcagaagcgaagacacagcagtatattactgtagcaccgccccaggcgggtttgacgtgtggggccaaggcactactgtaaccgttagctcagctagcaccaagggccccagcgtgtttcctctcgctccctgcagccggagcacatccgagagcaccgctgctctgggctgtctcgtgaaggactacttccctgaacccgtcaccgtcagctggaatagcggcgccctgacatccggcgtccacacattccccgctgtcctgcagagcagcggcctgtacagcctgagctccgtggtcaccgtgcctagcagcagcctgggaacaaagacctacacctgcaacgtggaccataagccctccaacaccaaggtggacaagcgggtggaatccaagtatggacccccctgtcctccttgccctgctcctgaatttctcggaggcccctccgtcttcctgtttccccccaagcccaaggacaccctgatgatctcccggacacccgaagtcacctgcgtcgtggtggatgtcagccaggaagatcccgaggtgcagttcaactggtacgtggacggagtggaggtgcataacgccaaaaccaagcccagggaagagcagttcaacagcacctatcgggtcgtgtccgtgctcaccgtcctgcatcaggattggctcaacggcaaggagtacaagtgcaaggtgtccaacaagggcctgccctcctccatcgagaagaccatctccaaggctaagggccaacctcgggagccccaagtgtataccctccctcccagccaggaggagatgaccaagaatcaagtgagcctgacctgcctcgtgaagggattttacccctccgacatcgctgtggaatgggaaagcaatggccaacctgagaacaactacaagaccacaccccccgtgctggactccgatggctccttcttcctgtacagcaggctgaccgtggacaaatcccggtggcaagagggaaacgtgttcagctgctccgtgatgcacgaggctctccacaaccactacacccagaagagcctctccctgagcctcggctagtaa

SEQ ID NO: 720 - DNA, 1341 bp, Artificial Sequence
  4G2.2G6 heavy chain DNA sequence
caaatacagctcgtgcagtctggtcccgatttgaagaagcctggagaaaccgtaaagataagctgtaaggctagtggttacactttcacaacatacgttatgtcatgggttaaacaggctcctggaaaagaccttaaatggatgggatggattaacacccatagcggtgtcccaacttacgctgacgattttaagggacgatttgacttttctctcgaaacttctgccaacacagcttttttgcagatcaacaatctcaagaatgaagacaccgcaacctatttctgcactcgagatgggaacgacggggatgcaatggataactggggacaaggcacatcagttaccgtgagctctgctagcaccaagggccccagcgtgtttcctctcgctccctgcagccggagcacatccgagagcaccgctgctctgggctgtctcgtgaaggactacttccctgaacccgtcaccgtcagctggaatagcggcgccctgacatccggcgtccacacattccccgctgtcctgcagagcagcggcctgtacagcctgagctccgtggtcaccgtgcctagcagcagcctgggaacaaagacctacacctgcaacgtggaccataagccctccaacaccaaggtggacaagcgggtggaatccaagtatggacccccctgtcctccttgccctgctcctgaatttctcggaggcccctccgtcttcctgtttccccccaagcccaaggacaccctgatgatctcccggacacccgaagtcacctgcgtcgtggtggatgtcagccaggaagatcccgaggtgcagttcaactggtacgtggacggagtggaggtgcataacgccaaaaccaagcccagggaagagcagttcaacagcacctatcgggtcgtgtccgtgctcaccgtcctgcatcaggattggctcaacggcaaggagtacaagtgcaaggtgtccaacaagggcctgccctcctccatcgagaagaccatctccaaggctaagggccaacctcgggagccccaagtgtataccctccctcccagccaggaggagatgaccaagaatcaagtgagcctgacctgcctcgtgaagggattttacccctccgacatcgctgtggaatgggaaagcaatggccaacctgagaacaactacaagaccacaccccccgtgctggactccgatggctccttcttcctgtacagcaggctgaccgtggacaaatcccggtggcaagagggaaacgtgttcagctgctccgtgatgcacgaggctctccacaaccactacacccagaagagcctctccctgagcctcggctagtaa

SEQ ID NO: 721 - DNA, 1344 bp, Artificial Sequence
  6B3.2D3 heavy chain DNA sequence
caggtgcagctgaagcagtcaggacctggcctagtgcagccctcacagagcctgtccatcacctgcacagtctctggtttctcattaactagttatggtgtacactgggttcgccagcctccaggaaagggtctggagtggctgggagtgatatggagtggtggaagcacagactataatgctgctttcatatccagactgagcatcagtaaggacaactccaagagccaagttttctttaaaatgaacagtctgcaagctgatgacactgccatatactactgtgccaaagggccttatgattacgacttaggctggtttgcttactggggccaagggactctggtcactgtctctgcagctagcaccaagggccccagcgtgtttcctctcgctccctgcagccggagcacatccgagagcaccgctgctctgggctgtctcgtgaaggactacttccctgaacccgtcaccgtcagctggaatagcggcgccctgacatccggcgtccacacattccccgctgtcctgcagagcagcggcctgtacagcctgagctccgtggtcaccgtgcctagcagcagcctgggaacaaagacctacacctgcaacgtggaccataagccctccaacaccaaggtggacaagcgggtggaatccaagtatggacccccctgtcctccttgccctgctcctgaatttctcggaggcccctccgtcttcctgtttccccccaagcccaaggacaccctgatgatctcccggacacccgaagtcacctgcgtcgtggtggatgtcagccaggaagatcccgaggtgcagttcaactggtacgtggacggagtggaggtgcataacgccaaaaccaagcccagggaagagcagttcaacagcacctatcgggtcgtgtccgtgctcaccgtcctgcatcaggattggctcaacggcaaggagtacaagtgcaaggtgtccaacaagggcctgccctcctccatcgagaagaccatctccaaggctaagggccaacctcgggagccccaagtgtataccctccctcccagccaggaggagatgaccaagaatcaagtgagcctgacctgcctcgtgaagggattttacccctccgacatcgctgtggaatgggaaagcaatggccaacctgagaacaactacaagaccacaccccccgtgctggactccgatggctccttcttcctgtacagcaggctgaccgtggacaaatcccggtggcaagagggaaacgtgttcagctgctccgtgatgcacgaggctctccacaaccactacacccagaagagcctctccctgagcctcggctagtaa

SEQ ID NO: 722 - DNA, 1332 bp, Artificial Sequence
  6H6.2D6 heavy chain DNA sequence
cagatccagctggtgcagtccggccccgagctgaagaagcccggcgagactgtgaagatctcctgcaaggcctccggctacaccttcaccacctacggcatgtcctgggtgaagcaggcccccggcaagggcctgaagtggatggcctggatcaacacctactccggcgtgcccacctacgccgacgacttcaagggcaggttcgccttctccctggagacttccgcctccaccgcctacctgcagatcaacaacctgaccaacgaggacaccgccacctacttctgcgccaggggcccctacgccatggactactggggccagggcacctccgtgaccgtgtcctccgctagcaccaagggccccagcgtgtttcctctcgctccctgcagccggagcacatccgagagcaccgctgctctgggctgtctcgtgaaggactacttccctgaacccgtcaccgtcagctggaatagcggcgccctgacatccggcgtccacacattccccgctgtcctgcagagcagcggcctgtacagcctgagctccgtggtcaccgtgcctagcagcagcctgggaacaaagacctacacctgcaacgtggaccataagccctccaacaccaaggtggacaagcgggtggaatccaagtatggacccccctgtcctccttgccctgctcctgaatttctcggaggcccctccgtcttcctgtttccccccaagcccaaggacaccctgatgatctcccggacacccgaagtcacctgcgtcgtggtggatgtcagccaggaagatcccgaggtgcagttcaactggtacgtggacggagtggaggtgcataacgccaaaaccaagcccagggaagagcagttcaacagcacctatcgggtcgtgtccgtgctcaccgtcctgcatcaggattggctcaacggcaaggagtacaagtgcaaggtgtccaacaagggcctgccctcctccatcgagaagaccatctccaaggctaagggccaacctcgggagccccaagtgtataccctccctcccagccaggaggagatgaccaagaatcaagtgagcctgacctgcctcgtgaagggattttacccctccgacatcgctgtggaatgggaaagcaatggccaacctgagaacaactacaagaccacaccccccgtgctggactccgatggctccttcttcctgtacagcaggctgaccgtggacaaatcccggtggcaagagggaaacgtgttcagctgctccgtgatgcacgaggctctccacaaccactacacccagaagagcctctccctgagcctcggctagtaa

SEQ ID NO: 723 - DNA, 1329 bp, Artificial Sequence
  9H2.2H10 heavy chain DNA sequence
caggtccagctgcagcagcctggggctgaactggtggggcctgggtcttcagtgaagctgtcctgcaaggcttctggctacaccttcaccaactactggatacattgggtgaagcagaggcctctacaaggccttgaatggattggtaacattgacccttctgatagtgaaactcactacaatcaaaagttcaaggacaaggccacattgactgtagacaaatcctccagcacagcctacatgcaactcagcagcctgacatctgaggactctgcggtctattactgtgcaagacatggttactacgactactggggccaaggcaccactctcacagtctcctcagctagcaccaagggccccagcgtgtttcctctcgctccctgcagccggagcacatccgagagcaccgctgctctgggctgtctcgtgaaggactacttccctgaacccgtcaccgtcagctggaatagcggcgccctgacatccggcgtccacacattccccgctgtcctgcagagcagcggcctgtacagcctgagctccgtggtcaccgtgcctagcagcagcctgggaacaaagacctacacctgcaacgtggaccataagccctccaacaccaaggtggacaagcgggtggaatccaagtatggacccccctgtcctccttgccctgctcctgaatttctcggaggcccctccgtcttcctgtttccccccaagcccaaggacaccctgatgatctcccggacacccgaagtcacctgcgtcgtggtggatgtcagccaggaagatcccgaggtgcagttcaactggtacgtggacggagtggaggtgcataacgccaaaaccaagcccagggaagagcagttcaacagcacctatcgggtcgtgtccgtgctcaccgtcctgcatcaggattggctcaacggcaaggagtacaagtgcaaggtgtccaacaagggcctgccctcctccatcgagaagaccatctccaaggctaagggccaacctcgggagccccaagtgtataccctccctcccagccaggaggagatgaccaagaatcaagtgagcctgacctgcctcgtgaagggattttacccctccgacatcgctgtggaatgggaaagcaatggccaacctgagaacaactacaagaccacaccccccgtgctggactccgatggctccttcttcctgtacagcaggctgaccgtggacaaatcccggtggcaagagggaaacgtgttcagctgctccgtgatgcacgaggctctccacaaccactacacccagaagagcctctccctgagcctcggctagtaa

SEQ ID NO: 724 - DNA, 1341 bp, Artificial Sequence
  13G4.2F8 heavy chain DNA sequence
caggtccagctgcagcagcctggggctgagctggtaaagcctggggcttcagtgaagttgtcctgcaaggcttctggctacactttcaccagctactggatgcactgggtgaagcagaggcctggacaaggccttgagtggattggaatgattcatcctaacagtggtagtactgactacaatgagaagttcaagaacaaggccacactgaatgtagacaaatcctccagtacagcctacatacaactcagcagcctgacatctgaggactctgcggtctattactgtacaagatgggggatttattactacgcgagggactactggggccaaggcaccactctcacagtctcctcagctagcaccaagggccccagcgtgtttcctctcgctccctgcagccggagcacatccgagagcaccgctgctctgggctgtctcgtgaaggactacttccctgaacccgtcaccgtcagctggaatagcggcgccctgacatccggcgtccacacattccccgctgtcctgcagagcagcggcctgtacagcctgagctccgtggtcaccgtgcctagcagcagcctgggaacaaagacctacacctgcaacgtggaccataagccctccaacaccaaggtggacaagcgggtggaatccaagtatggacccccctgtcctccttgccctgctcctgaatttctcggaggcccctccgtcttcctgtttccccccaagcccaaggacaccctgatgatctcccggacacccgaagtcacctgcgtcgtggtggatgtcagccaggaagatcccgaggtgcagttcaactggtacgtggacggagtggaggtgcataacgccaaaaccaagcccagggaagagcagttcaacagcacctatcgggtcgtgtccgtgctcaccgtcctgcatcaggattggctcaacggcaaggagtacaagtgcaaggtgtccaacaagggcctgccctcctccatcgagaagaccatctccaaggctaagggccaacctcgggagccccaagtgtataccctccctcccagccaggaggagatgaccaagaatcaagtgagcctgacctgcctcgtgaagggattttacccctccgacatcgctgtggaatgggaaagcaatggccaacctgagaacaactacaagaccacaccccccgtgctggactccgatggctccttcttcctgtacagcaggctgaccgtggacaaatcccggtggcaagagggaaacgtgttcagctgctccgtgatgcacgaggctctccacaaccactacacccagaagagcctctccctgagcctcggctagtaa

SEQ ID NO: 725 - DNA, 1335 bp, Artificial Sequence
  13H12.2F8 heavy chain DNA sequence
cagatccagctggtccaatcaggacccgaactgaaaaaaccaggcgagacagtcaaaatcagctgtaaggcctcaggctacactttcacaacctacgggatgtcatgggtaaagcaagctcctggcaaggggctgaaatggatgggttggatcaacacatactctggagtgcccacctacgctgacgactttaagggtagattcgcatttagcctggaaacaagtgccagtacagcctacctccagataaacaacttgaaaaacgaggataccgcaacctatttttgcgccgtcccctacgagtacgacggtgcctattggggtcagggtacactcgtaacagtttccgccgctagcaccaagggccccagcgtgtttcctctcgctccctgcagccggagcacatccgagagcaccgctgctctgggctgtctcgtgaaggactacttccctgaacccgtcaccgtcagctggaatagcggcgccctgacatccggcgtccacacattccccgctgtcctgcagagcagcggcctgtacagcctgagctccgtggtcaccgtgcctagcagcagcctgggaacaaagacctacacctgcaacgtggaccataagccctccaacaccaaggtggacaagcgggtggaatccaagtatggacccccctgtcctccttgccctgctcctgaatttctcggaggcccctccgtcttcctgtttccccccaagcccaaggacaccctgatgatctcccggacacccgaagtcacctgcgtcgtggtggatgtcagccaggaagatcccgaggtgcagttcaactggtacgtggacggagtggaggtgcataacgccaaaaccaagcccagggaagagcagttcaacagcacctatcgggtcgtgtccgtgctcaccgtcctgcatcaggattggctcaacggcaaggagtacaagtgcaaggtgtccaacaagggcctgccctcctccatcgagaagaccatctccaaggctaagggccaacctcgggagccccaagtgtataccctccctcccagccaggaggagatgaccaagaatcaagtgagcctgacctgcctcgtgaagggattttacccctccgacatcgctgtggaatgggaaagcaatggccaacctgagaacaactacaagaccacaccccccgtgctggactccgatggctccttcttcctgtacagcaggctgaccgtggacaaatcccggtggcaagagggaaacgtgttcagctgctccgtgatgcacgaggctctccacaaccactacacccagaagagcctctccctgagcctcggctagtaa

SEQ ID NO: 726 - DNA, 1329 bp, Artificial Sequence
  15G7.2A7 heavy chain DNA sequence
gaggtccagctgcaacaatctggacctgagctggtgaagcctggggcttcagtgaagatatcctgtaaggcttctggatacacgttcactgactactacatgaactgggtgaagcagagccatggaaagagccttgagtggattggagatattaatcctaacaatggtggtactaactacaaccagaagttcaagggcaaggccacattgactgtagacaagtcctccagcacagcctacatggagctccgcagcctgacatctgaggactctgcagtctattactgcacctcaggctacgggtttccttactggggccaggggactctggtcactgtctctgcagctagcaccaagggccccagcgtgtttcctctcgctccctgcagccggagcacatccgagagcaccgctgctctgggctgtctcgtgaaggactacttccctgaacccgtcaccgtcagctggaatagcggcgccctgacatccggcgtccacacattccccgctgtcctgcagagcagcggcctgtacagcctgagctccgtggtcaccgtgcctagcagcagcctgggaacaaagacctacacctgcaacgtggaccataagccctccaacaccaaggtggacaagcgggtggaatccaagtatggacccccctgtcctccttgccctgctcctgaatttctcggaggcccctccgtcttcctgtttccccccaagcccaaggacaccctgatgatctcccggacacccgaagtcacctgcgtcgtggtggatgtcagccaggaagatcccgaggtgcagttcaactggtacgtggacggagtggaggtgcataacgccaaaaccaagcccagggaagagcagttcaacagcacctatcgggtcgtgtccgtgctcaccgtcctgcatcaggattggctcaacggcaaggagtacaagtgcaaggtgtccaacaagggcctgccctcctccatcgagaagaccatctccaaggctaagggccaacctcgggagccccaagtgtataccctccctcccagccaggaggagatgaccaagaatcaagtgagcctgacctgcctcgtgaagggattttacccctccgacatcgctgtggaatgggaaagcaatggccaacctgagaacaactacaagaccacaccccccgtgctggactccgatggctccttcttcctgtacagcaggctgaccgtggacaaatcccggtggcaagagggaaacgtgttcagctgctccgtgatgcacgaggctctccacaaccactacacccagaagagcctctccctgagcctcggctagtaa

SEQ ID NO: 727 - DNA, 1335 bp, Artificial Sequence
  19D9.2E5 heavy chain DNA sequence
cagatccagttggtacagtctggacctgagctgaagaagcctggagagacagtcaagatctcctgcaaggcttctggatataccttcacaacctatggaatgggctgggtgaaacaggctccaggaaagggtttgaagtggatgggctggataaacacctactctggcgtgccaacatatgctgatgacttcaagggacggtttgccttctctttggaaacctctaccagcactgcctatttgcagatcaacaacctcaaaaatgaggacatggctacatatttctgtgcaaccccttatgaatacgacggggcttactggggccaagggactctggtcactgtctctgcagctagcaccaagggccccagcgtgtttcctctcgctccctgcagccggagcacatccgagagcaccgctgctctgggctgtctcgtgaaggactacttccctgaacccgtcaccgtcagctggaatagcggcgccctgacatccggcgtccacacattccccgctgtcctgcagagcagcggcctgtacagcctgagctccgtggtcaccgtgcctagcagcagcctgggaacaaagacctacacctgcaacgtggaccataagccctccaacaccaaggtggacaagcgggtggaatccaagtatggacccccctgtcctccttgccctgctcctgaatttctcggaggcccctccgtcttcctgtttccccccaagcccaaggacaccctgatgatctcccggacacccgaagtcacctgcgtcgtggtggatgtcagccaggaagatcccgaggtgcagttcaactggtacgtggacggagtggaggtgcataacgccaaaaccaagcccagggaagagcagttcaacagcacctatcgggtcgtgtccgtgctcaccgtcctgcatcaggattggctcaacggcaaggagtacaagtgcaaggtgtccaacaagggcctgccctcctccatcgagaagaccatctccaaggctaagggccaacctcgggagccccaagtgtataccctccctcccagccaggaggagatgaccaagaatcaagtgagcctgacctgcctcgtgaagggattttacccctccgacatcgctgtggaatgggaaagcaatggccaacctgagaacaactacaagaccacaccccccgtgctggactccgatggctccttcttcctgtacagcaggctgaccgtggacaaatcccggtggcaagagggaaacgtgttcagctgctccgtgatgcacgaggctctccacaaccactacacccagaagagcctctccctgagcctcggctagtaa

SEQ ID NO: 728 - DNA, 1320 bp, Artificial Sequence
  23B10.2B12 heavy chain DNA sequence
caggtccagctgcagcagtctggacctgaactggtgaagcctggggattctgtgaagatatcctgcaaggctgctggctacaccttcagtgactattatataaactgggtgaagcagaggcctggacagggacttgagtggattggatggatttatcctgtaagcgttaatactaagtacaatgagaagttcaagggcaaggccacattgactgtagacacatcctccagcacagcctacatgcagctcagcagcctgacctctgaggactctggggtctatttctgtgcctaccttgattattggggccaagggactctggtcactgtctctgcagctagcaccaagggccccagcgtgtttcctctcgctccctgcagccggagcacatccgagagcaccgctgctctgggctgtctcgtgaaggactacttccctgaacccgtcaccgtcagctggaatagcggcgccctgacatccggcgtccacacattccccgctgtcctgcagagcagcggcctgtacagcctgagctccgtggtcaccgtgcctagcagcagcctgggaacaaagacctacacctgcaacgtggaccataagccctccaacaccaaggtggacaagcgggtggaatccaagtatggacccccctgtcctccttgccctgctcctgaatttctcggaggcccctccgtcttcctgtttccccccaagcccaaggacaccctgatgatctcccggacacccgaagtcacctgcgtcgtggtggatgtcagccaggaagatcccgaggtgcagttcaactggtacgtggacggagtggaggtgcataacgccaaaaccaagcccagggaagagcagttcaacagcacctatcgggtcgtgtccgtgctcaccgtcctgcatcaggattggctcaacggcaaggagtacaagtgcaaggtgtccaacaagggcctgccctcctccatcgagaagaccatctccaaggctaagggccaacctcgggagccccaagtgtataccctccctcccagccaggaggagatgaccaagaatcaagtgagcctgacctgcctcgtgaagggattttacccctccgacatcgctgtggaatgggaaagcaatggccaacctgagaacaactacaagaccacaccccccgtgctggactccgatggctccttcttcctgtacagcaggctgaccgtggacaaatcccggtggcaagagggaaacgtgttcagctgctccgtgatgcacgaggctctccacaaccactacacccagaagagcctctccctgagcctcggctagtaa

SEQ ID NO: 729 - DNA, 1344 bp, Artificial Sequence
  24D12.2H9 heavy chain DNA sequence
caggtgcagctgaagcagtcaggacctggcctagtgcagccctcacagagcctgtccatcacctgcacagtctctggtttctcattaactagctatggtgtacactgggttcgccaggctccaggaaagggtctggaatggctgggagtgatatggagtggtggaagcacagactataatgctgctttcatgtccagactgagcatcagcaaggacaactccaagagccaagttttctttaaaatgaacagtctgcaagctgatgacactgccatatactactgtgccaaaagccctgatggttacgacgtcgcctggtttggttactggggccaagggactctggtcactgtctctgcagctagcaccaagggccccagcgtgtttcctctcgctccctgcagccggagcacatccgagagcaccgctgctctgggctgtctcgtgaaggactacttccctgaacccgtcaccgtcagctggaatagcggcgccctgacatccggcgtccacacattccccgctgtcctgcagagcagcggcctgtacagcctgagctccgtggtcaccgtgcctagcagcagcctgggaacaaagacctacacctgcaacgtggaccataagccctccaacaccaaggtggacaagcgggtggaatccaagtatggacccccctgtcctccttgccctgctcctgaatttctcggaggcccctccgtcttcctgtttccccccaagcccaaggacaccctgatgatctcccggacacccgaagtcacctgcgtcgtggtggatgtcagccaggaagatcccgaggtgcagttcaactggtacgtggacggagtggaggtgcataacgccaaaaccaagcccagggaagagcagttcaacagcacctatcgggtcgtgtccgtgctcaccgtcctgcatcaggattggctcaacggcaaggagtacaagtgcaaggtgtccaacaagggcctgccctcctccatcgagaagaccatctccaaggctaagggccaacctcgggagccccaagtgtataccctccctcccagccaggaggagatgaccaagaatcaagtgagcctgacctgcctcgtgaagggattttacccctccgacatcgctgtggaatgggaaagcaatggccaacctgagaacaactacaagaccacaccccccgtgctggactccgatggctccttcttcctgtacagcaggctgaccgtggacaaatcccggtggcaagagggaaacgtgttcagctgctccgtgatgcacgaggctctccacaaccactacacccagaagagcctctccctgagcctcggctagtaa

SEQ ID NO: 730 - DNA, 1350 bp, Artificial Sequence
  F846C.1B2 heavy chain DNA sequence
cagatccagttggtgcagtctggacctgagctgaagaagcctggagagacagtcaagatctcctgcaaggcttctgggtataccttcacaaactatggaatgaattgggtgaagcaggctccaggaaagggtttaaagtggatgggctggataaacacctacactggagagccatcatatgctgatgacttcaagggacggtttgccttctctttggaaacctctgccagcactgcctatttgcagatcaacaacctcaaaaatgaggacatggctacatatttctgtgcaagatgggggggttacgctggggattactatgctatggacttctggggtcaaggaacctcagtcaccgtctcctcagctagcaccaagggccccagcgtgtttcctctcgctccctgcagccggagcacatccgagagcaccgctgctctgggctgtctcgtgaaggactacttccctgaacccgtcaccgtcagctggaatagcggcgccctgacatccggcgtccacacattccccgctgtcctgcagagcagcggcctgtacagcctgagctccgtggtcaccgtgcctagcagcagcctgggaacaaagacctacacctgcaacgtggaccataagccctccaacaccaaggtggacaagcgggtggaatccaagtatggacccccctgtcctccttgccctgctcctgaatttctcggaggcccctccgtcttcctgtttccccccaagcccaaggacaccctgatgatctcccggacacccgaagtcacctgcgtcgtggtggatgtcagccaggaagatcccgaggtgcagttcaactggtacgtggacggagtggaggtgcataacgccaaaaccaagcccagggaagagcagttcaacagcacctatcgggtcgtgtccgtgctcaccgtcctgcatcaggattggctcaacggcaaggagtacaagtgcaaggtgtccaacaagggcctgccctcctccatcgagaagaccatctccaaggctaagggccaacctcgggagccccaagtgtataccctccctcccagccaggaggagatgaccaagaatcaagtgagcctgacctgcctcgtgaagggattttacccctccgacatcgctgtggaatgggaaagcaatggccaacctgagaacaactacaagaccacaccccccgtgctggactccgatggctccttcttcctgtacagcaggctgaccgtggacaaatcccggtggcaagagggaaacgtgttcagctgctccgtgatgcacgaggctctccacaaccactacacccagaagagcctctccctgagcctcggctagtaa

SEQ ID NO: 731 - DNA, 1350 bp, Artificial Sequence
  F846C.1F5 heavy chain DNA sequence
cagatccagttggtgcagtctggacctgagctgaagaagcctggagagacagtcaagatctcctgcaaggcttctgggtataccttcacaaactatggaatgaactgggtgaagcaggctccaggaaagggtttaaagtggatgggctggataaacacctacactggagagccatcatatgctgatgacttcaagggacggtttgccttctctttggaaacctctgccagcactgcctatttgcagatcaacaacctcaaaaatgaggacatggctacatatttctgtgcaagatgggggggttacgatggggattactatgctatggactactggggtcaaggaacctcagtcaccgtctcctcagctagcaccaagggccccagcgtgtttcctctcgctccctgcagccggagcacatccgagagcaccgctgctctgggctgtctcgtgaaggactacttccctgaacccgtcaccgtcagctggaatagcggcgccctgacatccggcgtccacacattccccgctgtcctgcagagcagcggcctgtacagcctgagctccgtggtcaccgtgcctagcagcagcctgggaacaaagacctacacctgcaacgtggaccataagccctccaacaccaaggtggacaagcgggtggaatccaagtatggacccccctgtcctccttgccctgctcctgaatttctcggaggcccctccgtcttcctgtttccccccaagcccaaggacaccctgatgatctcccggacacccgaagtcacctgcgtcgtggtggatgtcagccaggaagatcccgaggtgcagttcaactggtacgtggacggagtggaggtgcataacgccaaaaccaagcccagggaagagcagttcaacagcacctatcgggtcgtgtccgtgctcaccgtcctgcatcaggattggctcaacggcaaggagtacaagtgcaaggtgtccaacaagggcctgccctcctccatcgagaagaccatctccaaggctaagggccaacctcgggagccccaagtgtataccctccctcccagccaggaggagatgaccaagaatcaagtgagcctgacctgcctcgtgaagggattttacccctccgacatcgctgtggaatgggaaagcaatggccaacctgagaacaactacaagaccacaccccccgtgctggactccgatggctccttcttcctgtacagcaggctgaccgtggacaaatcccggtggcaagagggaaacgtgttcagctgctccgtgatgcacgaggctctccacaaccactacacccagaagagcctctccctgagcctcggctagtaa

SEQ ID NO: 732 - DNA, 1350 bp, Artificial Sequence
  F846C.1H12 heavy chain DNA sequence
cagatccagttggtgcagtctggacctgagctgaagaagcctggagagacagtcaagatctcctgcaaggcttctgggtataccttcacaaactttggaatgaactgggtgaagcaggctccaggaaagggtttaaagtggatgggctggataaacacctacactggagagccatcatatgctgatgacttcaagggacggtttgccttctctttggaaacctctgccagcactgcctatttgcagatcaacaacctcaaaaatgaggacattgctacatatttctgtgcaagatgggggggttacgctggggattactatgctatggactactggggtcaaggaacctcagtcaccgtctcctcagctagcaccaagggccccagcgtgtttcctctcgctccctgcagccggagcacatccgagagcaccgctgctctgggctgtctcgtgaaggactacttccctgaacccgtcaccgtcagctggaatagcggcgccctgacatccggcgtccacacattccccgctgtcctgcagagcagcggcctgtacagcctgagctccgtggtcaccgtgcctagcagcagcctgggaacaaagacctacacctgcaacgtggaccataagccctccaacaccaaggtggacaagcgggtggaatccaagtatggacccccctgtcctccttgccctgctcctgaatttctcggaggcccctccgtcttcctgtttccccccaagcccaaggacaccctgatgatctcccggacacccgaagtcacctgcgtcgtggtggatgtcagccaggaagatcccgaggtgcagttcaactggtacgtggacggagtggaggtgcataacgccaaaaccaagcccagggaagagcagttcaacagcacctatcgggtcgtgtccgtgctcaccgtcctgcatcaggattggctcaacggcaaggagtacaagtgcaaggtgtccaacaagggcctgccctcctccatcgagaagaccatctccaaggctaagggccaacctcgggagccccaagtgtataccctccctcccagccaggaggagatgaccaagaatcaagtgagcctgacctgcctcgtgaagggattttacccctccgacatcgctgtggaatgggaaagcaatggccaacctgagaacaactacaagaccacaccccccgtgctggactccgatggctccttcttcctgtacagcaggctgaccgtggacaaatcccggtggcaagagggaaacgtgttcagctgctccgtgatgcacgaggctctccacaaccactacacccagaagagcctctccctgagcctcggctagtaa

SEQ ID NO: 733 - DNA, 1332 bp, Artificial Sequence
  F846C.1H5 heavy chain DNA sequence
gaggtccagctgttggagtctgggggaggcttagtgaagcctggagggtccctgaaactctcctgtgcagcctctggattcactttcagcagctatgccatgtcttgggttcgccagactccagagaagaggctggagtgggtcgcatccattagtagtggtggtgacacctactatccagacagtgtgaagggccgattcaccatctctagagataatgccaggaacatcctgtacctgcaaatgagcagtctgaggtctgaggacacggccatgtattactgtgcaagttatggtaactccctctttgactactggggccaaggcaccactctcacagtctcctcagctagcaccaagggccccagcgtgtttcctctcgctccctgcagccggagcacatccgagagcaccgctgctctgggctgtctcgtgaaggactacttccctgaacccgtcaccgtcagctggaatagcggcgccctgacatccggcgtccacacattccccgctgtcctgcagagcagcggcctgtacagcctgagctccgtggtcaccgtgcctagcagcagcctgggaacaaagacctacacctgcaacgtggaccataagccctccaacaccaaggtggacaagcgggtggaatccaagtatggacccccctgtcctccttgccctgctcctgaatttctcggaggcccctccgtcttcctgtttccccccaagcccaaggacaccctgatgatctcccggacacccgaagtcacctgcgtcgtggtggatgtcagccaggaagatcccgaggtgcagttcaactggtacgtggacggagtggaggtgcataacgccaaaaccaagcccagggaagagcagttcaacagcacctatcgggtcgtgtccgtgctcaccgtcctgcatcaggattggctcaacggcaaggagtacaagtgcaaggtgtccaacaagggcctgccctcctccatcgagaagaccatctccaaggctaagggccaacctcgggagccccaagtgtataccctccctcccagccaggaggagatgaccaagaatcaagtgagcctgacctgcctcgtgaagggattttacccctccgacatcgctgtggaatgggaaagcaatggccaacctgagaacaactacaagaccacaccccccgtgctggactccgatggctccttcttcctgtacagcaggctgaccgtggacaaatcccggtggcaagagggaaacgtgttcagctgctccgtgatgcacgaggctctccacaaccactacacccagaagagcctctccctgagcctcggctagtaa

SEQ ID NO: 734 - DNA, 1350 bp, Artificial Sequence; identical to SEQ ID NO: 731
  F846C.2H3 heavy chain DNA sequence

SEQ ID NO: 735 - DNA, 1326 bp, Artificial Sequence
  F846TC.14A2 heavy chain DNA sequence
cagatccagttggtgcagtctggacctgagctgaagaagcctggagagacagtcaagatctcctgcaaggcttctgggtataccttcacaaactatggaatgaactgggtgaagcaggctccaggaaagggtttaaagtggatgggctggataaacacctacactggagagccaacatatgctggtgacctcaagggacggtttgccttctctttggaaacctctgccagcactgcctatttgcagatcaacaacctcaaaaatgaggacacggctacatatttctgtgtaagatatactatggactactggggtcaaggaacctcagtcaccgtctcctcagctagcaccaagggccccagcgtgtttcctctcgctccctgcagccggagcacatccgagagcaccgctgctctgggctgtctcgtgaaggactacttccctgaacccgtcaccgtcagctggaatagcggcgccctgacatccggcgtccacacattccccgctgtcctgcagagcagcggcctgtacagcctgagctccgtggtcaccgtgcctagcagcagcctgggaacaaagacctacacctgcaacgtggaccataagccctccaacaccaaggtggacaagcgggtggaatccaagtatggacccccctgtcctccttgccctgctcctgaatttctcggaggcccctccgtcttcctgtttccccccaagcccaaggacaccctgatgatctcccggacacccgaagtcacctgcgtcgtggtggatgtcagccaggaagatcccgaggtgcagttcaactggtacgtggacggagtggaggtgcataacgccaaaaccaagcccagggaagagcagttcaacagcacctatcgggtcgtgtccgtgctcaccgtcctgcatcaggattggctcaacggcaaggagtacaagtgcaaggtgtccaacaagggcctgccctcctccatcgagaagaccatctccaaggctaagggccaacctcgggagccccaagtgtataccctccctcccagccaggaggagatgaccaagaatcaagtgagcctgacctgcctcgtgaagggattttacccctccgacatcgctgtggaatgggaaagcaatggccaacctgagaacaactacaagaccacaccccccgtgctggactccgatggctccttcttcctgtacagcaggctgaccgtggacaaatcccggtggcaagagggaaacgtgttcagctgctccgtgatgcacgaggctctccacaaccactacacccagaagagcctctccctgagcctcggctagtaa

SEQ ID NO: 736 - DNA, 1356 bp, Artificial Sequence
  F846TC.14E4 heavy chain DNA sequence
caggttactctgaaagagtctggccctgggatattgcagccctcccagaccctcagtctgacttgttctttctctgggttttcactgagcacttctggtatgggtgtaggctggattcgtcagccttcagggaagggtctggagtggctggcacacatttggtgggatgatgataagtactataacacagccctgaagagcgggctcacaatctccaaggatgcctccaaaaaccaggtcttcctcaagatcgccagtatggacactgcagatactgccacatactactgtgctcgaaacctctatgatggttcctacgggtactatgctatggactactggggtcaaggaacctcagtcaccgtctcctcagctagcaccaagggccccagcgtgtttcctctcgctccctgcagccggagcacatccgagagcaccgctgctctgggctgtctcgtgaaggactacttccctgaacccgtcaccgtcagctggaatagcggcgccctgacatccggcgtccacacattccccgctgtcctgcagagcagcggcctgtacagcctgagctccgtggtcaccgtgcctagcagcagcctgggaacaaagacctacacctgcaacgtggaccataagccctccaacaccaaggtggacaagcgggtggaatccaagtatggacccccctgtcctccttgccctgctcctgaatttctcggaggcccctccgtcttcctgtttccccccaagcccaaggacaccctgatgatctcccggacacccgaagtcacctgcgtcgtggtggatgtcagccaggaagatcccgaggtgcagttcaactggtacgtggacggagtggaggtgcataacgccaaaaccaagcccagggaagagcagttcaacagcacctatcgggtcgtgtccgtgctcaccgtcctgcatcaggattggctcaacggcaaggagtacaagtgcaaggtgtccaacaagggcctgccctcctccatcgagaagaccatctccaaggctaagggccaacctcgggagccccaagtgtataccctccctcccagccaggaggagatgaccaagaatcaagtgagcctgacctgcctcgtgaagggattttacccctccgacatcgctgtggaatgggaaagcaatggccaacctgagaacaactacaagaccacaccccccgtgctggactccgatggctccttcttcctgtacagcaggctgaccgtggacaaatcccggtggcaagagggaaacgtgttcagctgctccgtgatgcacgaggctctccacaaccactacacccagaagagcctctccctgagcctcggctagtaa

SEQ ID NO: 737 - DNA, 1350 bp, Artificial Sequence
  F846TC.16B5 heavy chain DNA sequence
cagatccagttggtgcagtctggacctgagctgaagaagcctggagagacagtcaagatctcctgcaaggcttctgggtataccttcacaaactatggaatgaactgggtgaagcaggctccaggaaagggtttaaagtggatgggctggataaacacctacactggagagccagcatatgctgatgacttcaagggacggtttgccttctctttggaaacctctgccagcactgcctatttgcagatcaacaacctcaaaaatgaggacatggctacatatttctgtgcaagatgggggggttacgatggggattactatgctatggactactggggtcaaggaacctcagtcaccgtctcctcagctagcaccaagggccccagcgtgtttcctctcgctccctgcagccggagcacatccgagagcaccgctgctctgggctgtctcgtgaaggactacttccctgaacccgtcaccgtcagctggaatagcggcgccctgacatccggcgtccacacattccccgctgtcctgcagagcagcggcctgtacagcctgagctccgtggtcaccgtgcctagcagcagcctgggaacaaagacctacacctgcaacgtggaccataagccctccaacaccaaggtggacaagcgggtggaatccaagtatggacccccctgtcctccttgccctgctcctgaatttctcggaggcccctccgtcttcctgtttccccccaagcccaaggacaccctgatgatctcccggacacccgaagtcacctgcgtcgtggtggatgtcagccaggaagatcccgaggtgcagttcaactggtacgtggacggagtggaggtgcataacgccaaaaccaagcccagggaagagcagttcaacagcacctatcgggtcgtgtccgtgctcaccgtcctgcatcaggattggctcaacggcaaggagtacaagtgcaaggtgtccaacaagggcctgccctcctccatcgagaagaccatctccaaggctaagggccaacctcgggagccccaagtgtataccctccctcccagccaggaggagatgaccaagaatcaagtgagcctgacctgcctcgtgaagggattttacccctccgacatcgctgtggaatgggaaagcaatggccaacctgagaacaactacaagaccacaccccccgtgctggactccgatggctccttcttcctgtacagcaggctgaccgtggacaaatcccggtggcaagagggaaacgtgttcagctgctccgtgatgcacgaggctctccacaaccactacacccagaagagcctctccctgagcctcggctagtaa

SEQ ID NO: 738 - DNA, 1353 bp, Artificial Sequence
  F846TC.7F10 heavy chain DNA sequence
gaagtgcagctggtggagtctgggggagacttagtgaagcctggagggtccctgaaactctcctgtgcagcctctggattcactttcagtaactatggcttgtcttggattcgccagactccagacaagaggctggagtgggtcgcaaccattagtagtggtggtagttacacctactatcctgacagtgtgaaggggcgattcaccatctccagagacagtgccaagaacaccctgtacctgcaaatgagcagtctgaagtctgaggacacagccatgtattactgtgcaagacatgcgcattactacggtgttagcccgtactactttgactactggggccaaggcacctgtctcacagtctcctcagctagcaccaagggccccagcgtgtttcctctcgctccctgcagccggagcacatccgagagcaccgctgctctgggctgtctcgtgaaggactacttccctgaacccgtcaccgtcagctggaatagcggcgccctgacatccggcgtccacacattccccgctgtcctgcagagcagcggcctgtacagcctgagctccgtggtcaccgtgcctagcagcagcctgggaacaaagacctacacctgcaacgtggaccataagccctccaacaccaaggtggacaagcgggtggaatccaagtatggacccccctgtcctccttgccctgctcctgaatttctcggaggcccctccgtcttcctgtttccccccaagcccaaggacaccctgatgatctcccggacacccgaagtcacctgcgtcgtggtggatgtcagccaggaagatcccgaggtgcagttcaactggtacgtggacggagtggaggtgcataacgccaaaaccaagcccagggaagagcagttcaacagcacctatcgggtcgtgtccgtgctcaccgtcctgcatcaggattggctcaacggcaaggagtacaagtgcaaggtgtccaacaagggcctgccctcctccatcgagaagaccatctccaaggctaagggccaacctcgggagccccaagtgtataccctccctcccagccaggaggagatgaccaagaatcaagtgagcctgacctgcctcgtgaagggattttacccctccgacatcgctgtggaatgggaaagcaatggccaacctgagaacaactacaagaccacaccccccgtgctggactccgatggctccttcttcctgtacagcaggctgaccgtggacaaatcccggtggcaagagggaaacgtgttcagctgctccgtgatgcacgaggctctccacaaccactacacccagaagagcctctccctgagcctcggctagtaa

SEQ ID NO: 739 - DNA, 1341 bp, Artificial Sequence
  F847C.10B9 heavy chain DNA sequence
cagatccagttggtgcagtctggacctgaggtgaagaagcctggagagacagtcaagatctcctgcaaggcttctgggtatatcttcacaaactatggaatgaactgggtgaagcaggctccaggaaagggtttaaagtggatgggctggataaacacctacactggagagccaacatatactgatgacttcaagggacggtttgccttctctttggaaacctctgccagcactgcctatttgcagatcaacaacctcaaaaatgaggacacggctacatatttctgtgcaaagtttggtaactacgtgggagctatggactactggggtcaaggaacctcagtcaccgtctcctcagctagcaccaagggccccagcgtgtttcctctcgctccctgcagccggagcacatccgagagcaccgctgctctgggctgtctcgtgaaggactacttccctgaacccgtcaccgtcagctggaatagcggcgccctgacatccggcgtccacacattccccgctgtcctgcagagcagcggcctgtacagcctgagctccgtggtcaccgtgcctagcagcagcctgggaacaaagacctacacctgcaacgtggaccataagccctccaacaccaaggtggacaagcgggtggaatccaagtatggacccccctgtcctccttgccctgctcctgaatttctcggaggcccctccgtcttcctgtttccccccaagcccaaggacaccctgatgatctcccggacacccgaagtcacctgcgtcgtggtggatgtcagccaggaagatcccgaggtgcagttcaactggtacgtggacggagtggaggtgcataacgccaaaaccaagcccagggaagagcagttcaacagcacctatcgggtcgtgtccgtgctcaccgtcctgcatcaggattggctcaacggcaaggagtacaagtgcaaggtgtccaacaagggcctgccctcctccatcgagaagaccatctccaaggctaagggccaacctcgggagccccaagtgtataccctccctcccagccaggaggagatgaccaagaatcaagtgagcctgacctgcctcgtgaagggattttacccctccgacatcgctgtggaatgggaaagcaatggccaacctgagaacaactacaagaccacaccccccgtgctggactccgatggctccttcttcctgtacagcaggctgaccgtggacaaatcccggtggcaagagggaaacgtgttcagctgctccgtgatgcacgaggctctccacaaccactacacccagaagagcctctccctgagcctcggctagtaa

SEQ ID NO: 740 - DNA, 1344 bp, Artificial Sequence
  F847C.11B1 heavy chain DNA sequence
gaggtccagcttcagcagtctggacctgagctggtgaaacctggggcctcagtgaagatatcctgcaaggcttctggaaacacattcactgaccacaacatgcactgggtgaagcagagccatggaaagagccttgagtggattggatatatttatccttacaatggtggtactggctacaaccagaagttcaagagcaaggccacattgactgtagacaattcctccagcacagtctacatggagctccgcagcctgacatctgaggactctgcagtctattactgtgcaagaggggagtatgattacctggcctggtttgcttactggggccaagggactctggtcactgtctctgcagctagcaccaagggccccagcgtgtttcctctcgctccctgcagccggagcacatccgagagcaccgctgctctgggctgtctcgtgaaggactacttccctgaacccgtcaccgtcagctggaatagcggcgccctgacatccggcgtccacacattccccgctgtcctgcagagcagcggcctgtacagcctgagctccgtggtcaccgtgcctagcagcagcctgggaacaaagacctacacctgcaacgtggaccataagccctccaacaccaaggtggacaagcgggtggaatccaagtatggacccccctgtcctccttgccctgctcctgaatttctcggaggcccctccgtcttcctgtttccccccaagcccaaggacaccctgatgatctcccggacacccgaagtcacctgcgtcgtggtggatgtcagccaggaagatcccgaggtgcagttcaactggtacgtggacggagtggaggtgcataacgccaaaaccaagcccagggaagagcagttcaacagcacctatcgggtcgtgtccgtgctcaccgtcctgcatcaggattggctcaacggcaaggagtacaagtgcaaggtgtccaacaagggcctgccctcctccatcgagaagaccatctccaaggctaagggccaacctcgggagccccaagtgtataccctccctcccagccaggaggagatgaccaagaatcaagtgagcctgacctgcctcgtgaagggattttacccctccgacatcgctgtggaatgggaaagcaatggccaacctgagaacaactacaagaccacaccccccgtgctggactccgatggctccttcttcctgtacagcaggctgaccgtggacaaatcccggtggcaagagggaaacgtgttcagctgctccgtgatgcacgaggctctccacaaccactacacccagaagagcctctccctgagcctcggctagtaa

SEQ ID NO: 741 - DNA, 1341 bp, Artificial Sequence
  F847C.12F12 heavy chain DNA sequence
cagatccagttggtgcagtctggacctgagctgaagaagcctggagagacagtcaagatctcctgcaaggcttctgggtataccttcacaaactatggaatgaactgggtgaagcaggctccaggaaagggtttaaagtggatgggctggataaacacctacactggagagccaacatatgttgatgacttcaagggacggtttgccttctctttggaaacctctgccagcactgcctatttgcggatcaacaacctcaaaaatgaggacacggctacatatttctgtgcaaagtttggtaactacgtgggagctatggactactggggtcaaggaacctcagtcaccgtctcctcagctagcaccaagggccccagcgtgtttcctctcgctccctgcagccggagcacatccgagagcaccgctgctctgggctgtctcgtgaaggactacttccctgaacccgtcaccgtcagctggaatagcggcgccctgacatccggcgtccacacattccccgctgtcctgcagagcagcggcctgtacagcctgagctccgtggtcaccgtgcctagcagcagcctgggaacaaagacctacacctgcaacgtggaccataagccctccaacaccaaggtggacaagcgggtggaatccaagtatggacccccctgtcctccttgccctgctcctgaatttctcggaggcccctccgtcttcctgtttccccccaagcccaaggacaccctgatgatctcccggacacccgaagtcacctgcgtcgtggtggatgtcagccaggaagatcccgaggtgcagttcaactggtacgtggacggagtggaggtgcataacgccaaaaccaagcccagggaagagcagttcaacagcacctatcgggtcgtgtccgtgctcaccgtcctgcatcaggattggctcaacggcaaggagtacaagtgcaaggtgtccaacaagggcctgccctcctccatcgagaagaccatctccaaggctaagggccaacctcgggagccccaagtgtataccctccctcccagccaggaggagatgaccaagaatcaagtgagcctgacctgcctcgtgaagggattttacccctccgacatcgctgtggaatgggaaagcaatggccaacctgagaacaactacaagaccacaccccccgtgctggactccgatggctccttcttcctgtacagcaggctgaccgtggacaaatcccggtggcaagagggaaacgtgttcagctgctccgtgatgcacgaggctctccacaaccactacacccagaagagcctctccctgagcctcggctagtaa

SEQ ID NO: 742 - DNA, 1341 bp, Artificial Sequence; identical to SEQ ID NO: 739
  F847C.26F5 heavy chain DNA sequence

SEQ ID NO: 743 - DNA, 1335 bp, Artificial Sequence
  F847C.4B10 heavy chain DNA sequence
gaggtgcagcttgttgagactgggggaggcttagtgaagcctggagggtccctgaaactctcctgtgcagcctctggattcactttcagtagctatgccatgtcttgggttcgccagactccagagaagaggctggagtgggtcgcatccattagtagtggtggtagcacctactatccagacagtgtgaagggccgattcaccatctccagagataatgccaggaacatcctgtacctgcaaatgagcagtctgaggtctgaggacacggccatgtattactgtacaaggtttactacggtagtagagatggactactggggtcaaggaacctcagtcaccgtctcctcagctagcaccaagggccccagcgtgtttcctctcgctccctgcagccggagcacatccgagagcaccgctgctctgggctgtctcgtgaaggactacttccctgaacccgtcaccgtcagctggaatagcggcgccctgacatccggcgtccacacattccccgctgtcctgcagagcagcggcctgtacagcctgagctccgtggtcaccgtgcctagcagcagcctgggaacaaagacctacacctgcaacgtggaccataagccctccaacaccaaggtggacaagcgggtggaatccaagtatggacccccctgtcctccttgccctgctcctgaatttctcggaggcccctccgtcttcctgtttccccccaagcccaaggacaccctgatgatctcccggacacccgaagtcacctgcgtcgtggtggatgtcagccaggaagatcccgaggtgcagttcaactggtacgtggacggagtggaggtgcataacgccaaaaccaagcccagggaagagcagttcaacagcacctatcgggtcgtgtccgtgctcaccgtcctgcatcaggattggctcaacggcaaggagtacaagtgcaaggtgtccaacaagggcctgccctcctccatcgagaagaccatctccaaggctaagggccaacctcgggagccccaagtgtataccctccctcccagccaggaggagatgaccaagaatcaagtgagcctgacctgcctcgtgaagggattttacccctccgacatcgctgtggaatgggaaagcaatggccaacctgagaacaactacaagaccacaccccccgtgctggactccgatggctccttcttcctgtacagcaggctgaccgtggacaaatcccggtggcaagagggaaacgtgttcagctgctccgtgatgcacgaggctctccacaaccactacacccagaagagcctctccctgagcctcggctagtaa

SEQ ID NO: 744 - DNA, 1320 bp, Artificial Sequence
  F849C.8D10 heavy chain DNA sequence
caggtccaactgcagcagactggtgctgagcttgtgaagcctggggcctcagtgaagctgtcctgcaaggcttctggctatactttcaccagctactggataaactgggtgaagcagaggcctggacaaggccttgagtggattggaaacatttatcctggtagtagtagtatttactacagtgagaagttcaagagtaaggccacactgactgtagacacatcctccagcacagcctacatgcagctcagcagcctgacatctgacgactctgcggtctattattgtgcaagatggggctactggggccaaggcaccactctcacagtctcctcagctagcaccaagggccccagcgtgtttcctctcgctccctgcagccggagcacatccgagagcaccgctgctctgggctgtctcgtgaaggactacttccctgaacccgtcaccgtcagctggaatagcggcgccctgacatccggcgtccacacattccccgctgtcctgcagagcagcggcctgtacagcctgagctccgtggtcaccgtgcctagcagcagcctgggaacaaagacctacacctgcaacgtggaccataagccctccaacaccaaggtggacaagcgggtggaatccaagtatggacccccctgtcctccttgccctgctcctgaatttctcggaggcccctccgtcttcctgtttccccccaagcccaaggacaccctgatgatctcccggacacccgaagtcacctgcgtcgtggtggatgtcagccaggaagatcccgaggtgcagttcaactggtacgtggacggagtggaggtgcataacgccaaaaccaagcccagggaagagcagttcaacagcacctatcgggtcgtgtccgtgctcaccgtcctgcatcaggattggctcaacggcaaggagtacaagtgcaaggtgtccaacaagggcctgccctcctccatcgagaagaccatctccaaggctaagggccaacctcgggagccccaagtgtataccctccctcccagccaggaggagatgaccaagaatcaagtgagcctgacctgcctcgtgaagggattttacccctccgacatcgctgtggaatgggaaagcaatggccaacctgagaacaactacaagaccacaccccccgtgctggactccgatggctccttcttcctgtacagcaggctgaccgtggacaaatcccggtggcaagagggaaacgtgttcagctgctccgtgatgcacgaggctctccacaaccactacacccagaagagcctctccctgagcctcggctagtaa

SEQ ID NO: 745 - DNA, 1347 bp, Artificial Sequence
  F849C.8H3 heavy chain DNA sequence
caggttactctgaaagagtctggccctgggatattgcagccctcccagaccctcagtctgacttgttctttctctgggttttcactgagcacttttggtatgggtgtaggctggattcgtcagccttcagggaagggtctggagtggctggcacacatttggtgggatgatgataaacactataacccagccctgaagagccggctcacaatctccaaggatacctccaaaaaccaggtcttcctcaggatcgccaatgtggacactgcagataatgccacatattactgtgctcgaatcgactatggtgactacgtcgggtttgcttattggggccaagggactctggtcactgtctctgcagctagcaccaagggccccagcgtgtttcctctcgctccctgcagccggagcacatccgagagcaccgctgctctgggctgtctcgtgaaggactacttccctgaacccgtcaccgtcagctggaatagcggcgccctgacatccggcgtccacacattccccgctgtcctgcagagcagcggcctgtacagcctgagctccgtggtcaccgtgcctagcagcagcctgggaacaaagacctacacctgcaacgtggaccataagccctccaacaccaaggtggacaagcgggtggaatccaagtatggacccccctgtcctccttgccctgctcctgaatttctcggaggcccctccgtcttcctgtttccccccaagcccaaggacaccctgatgatctcccggacacccgaagtcacctgcgtcgtggtggatgtcagccaggaagatcccgaggtgcagttcaactggtacgtggacggagtggaggtgcataacgccaaaaccaagcccagggaagagcagttcaacagcacctatcgggtcgtgtccgtgctcaccgtcctgcatcaggattggctcaacggcaaggagtacaagtgcaaggtgtccaacaagggcctgccctcctccatcgagaagaccatctccaaggctaagggccaacctcgggagccccaagtgtataccctccctcccagccaggaggagatgaccaagaatcaagtgagcctgacctgcctcgtgaagggattttacccctccgacatcgctgtggaatgggaaagcaatggccaacctgagaacaactacaagaccacaccccccgtgctggactccgatggctccttcttcctgtacagcaggctgaccgtggacaaatcccggtggcaagagggaaacgtgttcagctgctccgtgatgcacgaggctctccacaaccactacacccagaagagcctctccctgagcctcggctagtaa

SEQ ID NO: 746 - DNA, 1338 bp, Artificial Sequence
  846.2B11 heavy chain DNA sequence
caggtccagctacagcagtctggacctgagctggtgaggcctggggctttagtgaagatttcctgcaaggcttctggttacaccttcacaagctacgatataaactgggtgaagcagaggcctggacagggacttgagtggattggatggatttatcctggagatggtagtactaaatataatgagaaattcaagggcaaggccacactgactgcagacaaatcctccagcacagcctacatgcagctcagcagcctgacttctgagaactctgcagtctatttctgtgcaagagaggcggcttctaatgctatggactactggggtcaaggaacctcagtcaccgtctcctcagctagcaccaagggccccagcgtgtttcctctcgctccctgcagccggagcacatccgagagcaccgctgctctgggctgtctcgtgaaggactacttccctgaacccgtcaccgtcagctggaatagcggcgccctgacatccggcgtccacacattccccgctgtcctgcagagcagcggcctgtacagcctgagctccgtggtcaccgtgcctagcagcagcctgggaacaaagacctacacctgcaacgtggaccataagccctccaacaccaaggtggacaagcgggtggaatccaagtatggacccccctgtcctccttgccctgctcctgaatttctcggaggcccctccgtcttcctgtttccccccaagcccaaggacaccctgatgatctcccggacacccgaagtcacctgcgtcgtggtggatgtcagccaggaagatcccgaggtgcagttcaactggtacgtggacggagtggaggtgcataacgccaaaaccaagcccagggaagagcagttcaacagcacctatcgggtcgtgtccgtgctcaccgtcctgcatcaggattggctcaacggcaaggagtacaagtgcaaggtgtccaacaagggcctgccctcctccatcgagaagaccatctccaaggctaagggccaacctcgggagccccaagtgtataccctccctcccagccaggaggagatgaccaagaatcaagtgagcctgacctgcctcgtgaagggattttacccctccgacatcgctgtggaatgggaaagcaatggccaacctgagaacaactacaagaccacaccccccgtgctggactccgatggctccttcttcctgtacagcaggctgaccgtggacaaatcccggtggcaagagggaaacgtgttcagctgctccgtgatgcacgaggctctccacaaccactacacccagaagagcctctccctgagcctcggctagtaa

SEQ ID NO: 747 - DNA, 1350 bp, Artificial Sequence
  846.4D5 heavy chain DNA sequence
gaagtgaagcttgaggagtctggaggaggcttggtgcaacctggaggatccatgaaactctcctgtgttgcctctggattcactttcagtaactactggatgaactgggtccgccagtctccagagaaggggcttgagtgggttgctgaaattagattgaaatctaataattatgcaacacattatgcggagtctgtgaaagggaggttcaccatctcaagagatgattccaaaagtagtgtctacctgcaaatgaacaacttaagagctgaagacactggcatttattactgtaccaggcactacggctttccctactggtacttcgatgtctggggcgcagggaccacggtcaccgtctcctcagctagcaccaagggccccagcgtgtttcctctcgctccctgcagccggagcacatccgagagcaccgctgctctgggctgtctcgtgaaggactacttccctgaacccgtcaccgtcagctggaatagcggcgccctgacatccggcgtccacacattccccgctgtcctgcagagcagcggcctgtacagcctgagctccgtggtcaccgtgcctagcagcagcctgggaacaaagacctacacctgcaacgtggaccataagccctccaacaccaaggtggacaagcgggtggaatccaagtatggacccccctgtcctccttgccctgctcctgaatttctcggaggcccctccgtcttcctgtttccccccaagcccaaggacaccctgatgatctcccggacacccgaagtcacctgcgtcgtggtggatgtcagccaggaagatcccgaggtgcagttcaactggtacgtggacggagtggaggtgcataacgccaaaaccaagcccagggaagagcagttcaacagcacctatcgggtcgtgtccgtgctcaccgtcctgcatcaggattggctcaacggcaaggagtacaagtgcaaggtgtccaacaagggcctgccctcctccatcgagaagaccatctccaaggctaagggccaacctcgggagccccaagtgtataccctccctcccagccaggaggagatgaccaagaatcaagtgagcctgacctgcctcgtgaagggattttacccctccgacatcgctgtggaatgggaaagcaatggccaacctgagaacaactacaagaccacaccccccgtgctggactccgatggctccttcttcctgtacagcaggctgaccgtggacaaatcccggtggcaagagggaaacgtgttcagctgctccgtgatgcacgaggctctccacaaccactacacccagaagagcctctccctgagcctcggctagtaa

SEQ ID NO: 748 - DNA, 1338 bp, Artificial Sequence
  846T.1H2 heavy chain DNA sequence
cagatccagttggtgcagtctggacctgagctgaagaagcctggagagacagtcaagatctcctgcaaggcttctgggtataccttcacaaactatggaatgaactgggtgaagcaggctccaggaaagggtttaaagtggatgggctggataaacaccaacactggagagccaacatatgctgaagagttcaagggacggtttgccttctctttggaaacctctgccagcactgcctatttgcagatcaacaacctcaaaaatgaggacacggctacatatttctgtgcaaccggggggggtaactgggactttgactactggggccaaggcaccactctcacagtctcctcagctagcaccaagggccccagcgtgtttcctctcgctccctgcagccggagcacatccgagagcaccgctgctctgggctgtctcgtgaaggactacttccctgaacccgtcaccgtcagctggaatagcggcgccctgacatccggcgtccacacattccccgctgtcctgcagagcagcggcctgtacagcctgagctccgtggtcaccgtgcctagcagcagcctgggaacaaagacctacacctgcaacgtggaccataagccctccaacaccaaggtggacaagcgggtggaatccaagtatggacccccctgtcctccttgccctgctcctgaatttctcggaggcccctccgtcttcctgtttccccccaagcccaaggacaccctgatgatctcccggacacccgaagtcacctgcgtcgtggtggatgtcagccaggaagatcccgaggtgcagttcaactggtacgtggacggagtggaggtgcataacgccaaaaccaagcccagggaagagcagttcaacagcacctatcgggtcgtgtccgtgctcaccgtcctgcatcaggattggctcaacggcaaggagtacaagtgcaaggtgtccaacaagggcctgccctcctccatcgagaagaccatctccaaggctaagggccaacctcgggagccccaagtgtataccctccctcccagccaggaggagatgaccaagaatcaagtgagcctgacctgcctcgtgaagggattttacccctccgacatcgctgtggaatgggaaagcaatggccaacctgagaacaactacaagaccacaccccccgtgctggactccgatggctccttcttcctgtacagcaggctgaccgtggacaaatcccggtggcaagagggaaacgtgttcagctgctccgtgatgcacgaggctctccacaaccactacacccagaagagcctctccctgagcctcggctagtaa

SEQ ID NO: 749 - DNA, 1326 bp, Artificial Sequence
  847.14H4 heavy chain DNA sequence
cagatccagttggtgcagtctggacctgaactgacgaagcctggagagacagtcaagatctcctgtaaggcttctggctataccttcacagactatggaatgaactgggtgaggcaggctccaggagagactttaaagtggatgggctggataaacacctacactggagagccaacatatgctgatgacttcaaggggcggtttgccttctctttggaatcctctgccagcactgcctatttgcagatcaacaacctcaaaaatgaggacgtggctacatatttctgtgcaagataccctatggactactggggtcaaggaacctcagtcaccgtctcctcagctagcaccaagggccccagcgtgtttcctctcgctccctgcagccggagcacatccgagagcaccgctgctctgggctgtctcgtgaaggactacttccctgaacccgtcaccgtcagctggaatagcggcgccctgacatccggcgtccacacattccccgctgtcctgcagagcagcggcctgtacagcctgagctccgtggtcaccgtgcctagcagcagcctgggaacaaagacctacacctgcaacgtggaccataagccctccaacaccaaggtggacaagcgggtggaatccaagtatggacccccctgtcctccttgccctgctcctgaatttctcggaggcccctccgtcttcctgtttccccccaagcccaaggacaccctgatgatctcccggacacccgaagtcacctgcgtcgtggtggatgtcagccaggaagatcccgaggtgcagttcaactggtacgtggacggagtggaggtgcataacgccaaaaccaagcccagggaagagcagttcaacagcacctatcgggtcgtgtccgtgctcaccgtcctgcatcaggattggctcaacggcaaggagtacaagtgcaaggtgtccaacaagggcctgccctcctccatcgagaagaccatctccaaggctaagggccaacctcgggagccccaagtgtataccctccctcccagccaggaggagatgaccaagaatcaagtgagcctgacctgcctcgtgaagggattttacccctccgacatcgctgtggaatgggaaagcaatggccaacctgagaacaactacaagaccacaccccccgtgctggactccgatggctccttcttcctgtacagcaggctgaccgtggacaaatcccggtggcaagagggaaacgtgttcagctgctccgtgatgcacgaggctctccacaaccactacacccagaagagcctctccctgagcctcggctagtaa

SEQ ID NO: 750 - DNA, 663 bp, Artificial Sequence
  TB001 light chain DNA sequence
gacatcgtgctgacccagtctccactgagcctgcctgttacacctggcgagccagcctccatctcctgcagatcctctaagtccctgctgtacaaggacggcaagacctacctgaactggttcctgcagaagcccggccagtctcctcagctcctgatctacctgatgagcacccatgcctctggcgtgcccgatagattttccggctctggctctggcaccgacttcaccctgaagatctccagagtggaagccgaggacgtgggcgtgtactactgtcagcagctggtggactaccctctgacctttggcggcggaacaaagctggaaatcaagcggacagtggccgctccttccgtgttcatcttcccaccttccgacgagcagctgaagtccggcacagcttctgtcgtgtgcctgctgaacaacttctaccctcgggaagccaaggtgcagtggaaggtggacaatgccctgcagtccggcaactcccaagagtctgtgaccgagcaggactccaaggacagcacctacagcctgtcctccacactgaccctgtccaaggccgactacgagaagcacaaggtgtacgcctgcgaagtgacccatcagggcctgtctagccctgtgaccaagtctttcaaccggggcgagtgctgatga

SEQ ID NO: 751 - DNA, 660 bp, Artificial Sequence
  TB006 light chain DNA sequence
gatatagtgatgacccaaacacctttgtccctgtcagtcaccccaggccaacccgcatctatctcatgcaaatcctcaaaaagtcttttgcactctgacgggataacatatctctactggtatcttcaaaaacctggtcagtccccccagctcttgatctatagaatgagtaaccttgcctctggtgtccccgaccggtttagtggaagcgggtctgggaccgacttcaccctcaagattagtcgcgtcgaagccgaagatgtgggagtgtattactgtgcccagatgctcgaatttcccctgacatttggtcaaggaactaaattggagattaagcggaccgtggccgcccccagcgtgttcatcttccctcccagcgacgagcagctgaagtctggcaccgccagcgtggtgtgcctgctgaacaacttctacccccgcgaggccaaggtgcagtggaaggtggacaacgccctgcagagcggcaacagccaggagagcgtgaccgagcaggactccaaggacagcacctacagcctgagcagcaccctgaccctgagcaaggccgactacgagaagcacaaggtgtacgcctgcgaggtgacccaccagggactgtctagccccgtgaccaagagcttcaaccggggcgagtgctaa

SEQ ID NO: 752 - DNA, 645 bp, Artificial Sequence
  12G5.D7 light chain DNA sequence
gacatcctgatgacccaatctccatcctccatgtctgtatctctgggagacacagtcagcatcacttgccatgcaagtcagggcattaactctaatatggggtggttgcagcagaaaccagggaaatcatttaagggcctgatctatcatgcaaccaacttggaagatggagttccatcaaggttcagtggcagtggatctggagcagattattctctcaccatcagcagcctggaatctgaagattttgcagactattactgtgtacagtatgctcagtttcctcctacgttcggatcggggaccaagctggaaataaaacggaccgtggccgcccccagcgtgttcatcttccctcccagcgacgagcagctgaagtctggcaccgccagcgtggtgtgcctgctgaacaacttctacccccgcgaggccaaggtgcagtggaaggtggacaacgccctgcagagcggcaacagccaggagagcgtgaccgagcaggactccaaggacagcacctacagcctgagcagcaccctgaccctgagcaaggccgactacgagaagcacaaggtgtacgcctgcgaggtgacccaccagggactgtctagccccgtgaccaagagcttcaaccggggcgagtgctaa

SEQ ID NO: 753 - DNA, 660 bp, Artificial Sequence
  13A12.2E5 light chain DNA sequence
gatgttgtgatgacccagactccactcactttgtcggttgccattggacaaccagcttccatctcttgcaagtcgagtcagagcctcttatatactaatggaaaaacctatttgaattggttattacagaggccaggccagtctccaaaacgcctaatctatctgctgtctaaattggactctggagtccctgacaggttcagtgccagtggatcagggacagatttcacactgaaaatcagcagagtggaggctgaggatttgggagtttattactgcttgcagagtacacattttccgctcacgttcggtgctgggaccaagctggagatgaaacggaccgtggccgcccccagcgtgttcatcttccctcccagcgacgagcagctgaagtctggcaccgccagcgtggtgtgcctgctgaacaacttctacccccgcgaggccaaggtgcagtggaaggtggacaacgccctgcagagcggcaacagccaggagagcgtgaccgagcaggactccaaggacagcacctacagcctgagcagcaccctgaccctgagcaaggccgactacgagaagcacaaggtgtacgcctgcgaggtgacccaccagggactgtctagccccgtgaccaagagcttcaaccggggcgagtgctaa

SEQ ID NO: 754 - DNA, 660 bp, Artificial Sequence
  14H10.2C9 light chain DNA sequence
gatgttgtgatgacccagactccactcactttgtcggttaccattggacaaccagcctccatctcttgcaagtcaagtcagagcctcttcgatagtgatggaaagacatatttgaattggttgttacagaggccaggccagtctccaaagcgcctaatctatctggtgtctaaactggactctggagtccctgacaggttcactggcagtggatcagggacagatttcacactgaaaatcagcagagtggaggctgaggatttgggagtttattattgctggcaaggtacacattttcctctcacgttcggtgctgggaccaagctggaaatgaaacggaccgtggccgcccccagcgtgttcatcttccctcccagcgacgagcagctgaagtctggcaccgccagcgtggtgtgcctgctgaacaacttctacccccgcgaggccaaggtgcagtggaaggtggacaacgccctgcagagcggcaacagccaggagagcgtgaccgagcaggactccaaggacagcacctacagcctgagcagcaccctgaccctgagcaaggccgactacgagaagcacaaggtgtacgcctgcgaggtgacccaccagggactgtctagccccgtgaccaagagcttcaaccggggcgagtgctaa

SEQ ID NO: 755 - DNA, 660 bp, Artificial Sequence
  15F10.2D6 light chain DNA sequence
gatgttttgatgacccaaactccactctccctgcctgtcagtcttggagatcaagcctccatctcttgcagatctagtcagagcattgtacataataatggaaacacctatttagaatggtacctgcagaaaccaggccagtctccaaaactcctgatctacaaagtttccaaccgattttctggggtcccagacaggttcagtggcagtggatcagggacagatttcacactcaagatcagcagagtggaggctgaggatctgggagtttattactgctttcaaggttcacatgttccgctcacgttcggtggtgggaccaagttggagctgaaacggaccgtggccgcccccagcgtgttcatcttccctcccagcgacgagcagctgaagtctggcaccgccagcgtggtgtgcctgctgaacaacttctacccccgcgaggccaaggtgcagtggaaggtggacaacgccctgcagagcggcaacagccaggagagcgtgaccgagcaggactccaaggacagcacctacagcctgagcagcaccctgaccctgagcaaggccgactacgagaagcacaaggtgtacgcctgcgaggtgacccaccagggactgtctagccccgtgaccaagagcttcaaccggggcgagtgctaa

SEQ ID NO: 756 - DNA, 645 bp, Artificial Sequence
  19B5.2E6 light chain DNA sequence
gatatacaaatgactcaaactacctcttctctttccgcatctttgggtgatcgggtcactatatcctgctccgcctctcaaggcataaacaattacctgaattggtatcagcaaaaaccagacggaactgtaaaattgcttatctactacgcttcaagtctgcatagtggggttcccagcagattttccggttccgggtccggcactgattattctctcacaattagtaacctggaacctgaggacattgcaacttattactgtcaacaatacagtcaggtaccttacactttcggatcaggaacaaagttggaaatcaagaggaccgtggccgcccccagcgtgttcatcttccctcccagcgacgagcagctgaagtctggcaccgccagcgtggtgtgcctgctgaacaacttctacccccgcgaggccaaggtgcagtggaaggtggacaacgccctgcagagcggcaacagccaggagagcgtgaccgagcaggactccaaggacagcacctacagcctgagcagcaccctgaccctgagcaaggccgactacgagaagcacaaggtgtacgcctgcgaggtgacccaccagggactgtctagccccgtgaccaagagcttcaaccggggcgagtgctaa

SEQ ID NO: 757 - DNA, 645 bp, Artificial Sequence
  20D11.2C6 light chain DNA sequence
gacatccagatgaaccagtctccatccagtctgtctgcatccctcggagacacaattaccatcacttgccgtgccagtcagaacatttatatttggttaagttggtaccagcagaaaccaggaaatattcctaaactcttgatctataaggcttccaacttgcacacaggcgtcccatcaaggtttagtggcagtggatctggaacagatttcacattaaccatcagcactctgcagcctgaagacattgccacttacttctgtctccagggtcaaagttatcctctcacgttcggtgctgggaccaagctggagatgaaacggaccgtggccgcccccagcgtgttcatcttccctcccagcgacgagcagctgaagtctggcaccgccagcgtggtgtgcctgctgaacaacttctacccccgcgaggccaaggtgcagtggaaggtggacaacgccctgcagagcggcaacagccaggagagcgtgaccgagcaggactccaaggacagcacctacagcctgagcagcaccctgaccctgagcaaggccgactacgagaagcacaaggtgtacgcctgcgaggtgacccaccagggactgtctagccccgtgaccaagagcttcaaccggggcgagtgctaa

SEQ ID NO: 758 - DNA, 648 bp, Artificial Sequence
  20H5.A3 light chain DNA sequence
gatatccagatgacacagactacatcctccctgtctgcctctctgggagacagagtcaccatcaattgcagtgcaagtcaggacattagcaattatttaaactggtatcagcagaaaccagatggaactgttaaactcctgatctattacacatcaagtttactctcaggagtcccatcaaggttcagtggcagtgggtctgggacagattattctctcaccatcagcaacctggaacctgaagatattgccacttacttttgtcagcaatatagtaagcttccctatacgttcggatcggggacccacctggaaataaaacgtgctgatgttgcccctactgtgtccatcttccccccctcctccgagcagctgacatccggcggcgcctccgtggtgtgcttcctgaacaacttctaccccaaagacatcaacgtgaaatggaaaatcgacggctccgagaggcagaacggcgtgctgaactcctggacagaccaggactccaaagactccacatactccatgtcctccacactgacactgacaaaagacgagtacgagaggcacaactcctacacatgcgaggccacacacaaaacatccacatcccccatcgtgaaatccttcaacaggaacgagtgctaataa

SEQ ID NO: 759 - DNA, 645 bp, Artificial Sequence
  23H9.2E4 light chain DNA sequence
gatatccagatgacacagactacatcctccctgtctgcctctctgggagacagagtcaccatcagttgcagtgcaagtcagggcattaacaattatttaaactggtatcagcagaaaccagatggaactgttaaactcctgatctattacgcatcaagtttacactcaggagtcccatcaaggttcagtggcagtgggtctgggacagattattctctcaccatcagcaacctggaacctgaagatattgccacttactattgtcagcagtatagtcaggttccgtatacgttcggatcggggaccaagttggaaataaaacggaccgtggccgcccccagcgtgttcatcttccctcccagcgacgagcagctgaagtctggcaccgccagcgtggtgtgcctgctgaacaacttctacccccgcgaggccaaggtgcagtggaaggtggacaacgccctgcagagcggcaacagccaggagagcgtgaccgagcaggactccaaggacagcacctacagcctgagcagcaccctgaccctgagcaaggccgactacgagaagcacaaggtgtacgcctgcgaggtgacccaccagggactgtctagccccgtgaccaagagcttcaaccggggcgagtgctaa

SEQ ID NO: 760 - DNA, 660 bp, Artificial Sequence
  2D10-VH0-VL0 light chain DNA sequence
gacatagtaatgacacaggccgcatttagcaatccagtaaccttgggcacatccgcctccatatcttgcaggtcatccaaaagcttgctgcactctgacggtattacttacctgtactggtatttgcagcgacctgggcaatcccctcaactcctgatttaccgcatgagcaacctggcctcaggggtgcctgaccgcttttcaggatcagggagcggcactgacttcaccttgcgaatcagcagagtagaagcagaggatgttggagtttactactgtgcccagatgatcgaatttccacttacttttggggccgggaccattctggagcttaaacggaccgtggccgcccccagcgtgttcatcttccctcccagcgacgagcagctgaagtctggcaccgccagcgtggtgtgcctgctgaacaacttctacccccgcgaggccaaggtgcagtggaaggtggacaacgccctgcagagcggcaacagccaggagagcgtgaccgagcaggactccaaggacagcacctacagcctgagcagcaccctgaccctgagcaaggccgactacgagaagcacaaggtgtacgcctgcgaggtgacccaccagggactgtctagccccgtgaccaagagcttcaaccggggcgagtgctaa

SEQ ID NO: 761 - DNA, 660 bp, Artificial Sequence
  3B11.2G2 light chain DNA sequence
gatgttgtgatgacccagactccactcactttgtcggttgccattggacaaccagcttccatctcttgcaagtcgagtcagagcctcttatatactaatggaaaaacctatttgaattggttattacagaggccaggccagtctccaaaacgcctaatctatctggtgtctaaattggactctggagtccctgacaggttcagtggcagtggatcagggacagatttcacactgaaaatcagcagagtggaggctgaggatttgggagtttattactgcttgcagagtacacattttccgctcacgttcggtgctgggaccaagctggagctgaaacggaccgtggccgcccccagcgtgttcatcttccctcccagcgacgagcagctgaagtctggcaccgccagcgtggtgtgcctgctgaacaacttctacccccgcgaggccaaggtgcagtggaaggtggacaacgccctgcagagcggcaacagccaggagagcgtgaccgagcaggactccaaggacagcacctacagcctgagcagcaccctgaccctgagcaaggccgactacgagaagcacaaggtgtacgcctgcgaggtgacccaccagggactgtctagccccgtgaccaagagcttcaaccggggcgagtgctaa

SEQ ID NO: 762 - DNA, 660 bp, Artificial Sequence
  7D8.2D8 light chain DNA sequence
gatgttttgatgacccaaactccactctccctgcctgtcagtcttggagatcaagcctccatctcttgcagatctagtcagagcattgtacatagtaatggaaacacctatttagaatggtacctgcagaaaccaggccagtctccaaagctcctgatctacaaagtttccaaccgattttctggggtcccagacaggttcagtggcagtggatcagggacagatttcacactcaagatcagcagagtggaggctgaggatctgggagtttattactgctttcaaggttcacatgttccgctcacgttcggtgctgggaccaagctggagctgaaacggaccgtggccgcccccagcgtgttcatcttccctcccagcgacgagcagctgaagtctggcaccgccagcgtggtgtgcctgctgaacaacttctacccccgcgaggccaaggtgcagtggaaggtggacaacgccctgcagagcggcaacagccaggagagcgtgaccgagcaggactccaaggacagcacctacagcctgagcagcaccctgaccctgagcaaggccgactacgagaagcacaaggtgtacgcctgcgaggtgacccaccagggactgtctagccccgtgaccaagagcttcaaccggggcgagtgctaa

SEQ ID NO: 763 - DNA, 663 bp, Artificial Sequence
  mIMT001 light chain DNA sequence
gatattgttattactcaggatgagcttagtaatcctgtcactagcggggaaagtgttagtatcagttgtcgttcatccaagtcactcctctacaaagacggcaagacttatctcaactggtttcttcaacgacccggtcaatctccacagctcctgatttacctgatgtcaactcacgcttctggtgttagcgaccgtttctccggaagtggctccgggacagacttcactcttgaaatctcacgtgtaaaagcagaggacgtaggtgtctattattgtcaacagcttgtggactaccccttgacctttggcgctggcacaaagctggaactgaagcgtgctgatgttgcccctactgtgtccatcttccccccctcctccgagcagctgacatccggcggcgcctccgtggtgtgcttcctgaacaacttctaccccaaagacatcaacgtgaaatggaaaatcgacggctccgagaggcagaacggcgtgctgaactcctggacagaccaggactccaaagactccacatactccatgtcctccacactgacactgacaaaagacgagtacgagaggcacaactcctacacatgcgaggccacacacaaaacatccacatcccccatcgtgaaatccttcaacaggaacgagtgctaataa

SEQ ID NO: 764 - DNA, 660 bp, Artificial Sequence
  4A11.2B5 light chain DNA sequence
gacattgtgatgactcaggcagccttttccaaccctgtaacacttggaactagtgcctccatctcatgccgttccagcaagagtcttttgcacagcgatgggataacctatctctattggtatctgcaacgacccggtcagtcaccccaacttcttatctatcgaatgtctaacttggcctccggcgtgcccgaccgcttttccgggagtgggagcggtacagatttcaccttgcgaatttcccgggttgaggcagaggacgtaggtgtctactattgtgctcagatgcttgagtttcctctcactttcggagccggcaccaaactggaactgaaacggaccgtggccgcccccagcgtgttcatcttccctcccagcgacgagcagctgaagtctggcaccgccagcgtggtgtgcctgctgaacaacttctacccccgcgaggccaaggtgcagtggaaggtggacaacgccctgcagagcggcaacagccaggagagcgtgaccgagcaggactccaaggacagcacctacagcctgagcagcaccctgaccctgagcaaggccgactacgagaagcacaaggtgtacgcctgcgaggtgacccaccagggactgtctagccccgtgaccaagagcttcaaccggggcgagtgctaa

SEQ ID NO: 765 - DNA, 660 bp, Artificial Sequence; identical to SEQ ID NO: 751
  4A11.H1L1 light chain DNA sequence

SEQ ID NO: 766 - DNA, 660 bp, Artificial Sequence
  4A11.H4L2 light chain DNA sequence
gatattgtaatgacccaaagccccctgtccttgcctgttaccccaggtgagcctgccagcatatcttgccgatccagtaaatctctgcttcatagcgatggcatcacctatttgtattggtatttgcagaagcccggccagagcccccagttgctgatctacagaatgtccaaccttgctagtggagtgcccgaccggtttagcggttcaggctcagggactgatttcactcttaaaatcagtagggtagaggccgaagacgttggtgtatattattgtgctcagatgttggagtttccactcacatttggacaaggtacaaagctggaaattaagcggaccgtggccgcccccagcgtgttcatcttccctcccagcgacgagcagctgaagtctggcaccgccagcgtggtgtgcctgctgaacaacttctacccccgcgaggccaaggtgcagtggaaggtggacaacgccctgcagagcggcaacagccaggagagcgtgaccgagcaggactccaaggacagcacctacagcctgagcagcaccctgaccctgagcaaggccgactacgagaagcacaaggtgtacgcctgcgaggtgacccaccagggactgtctagccccgtgaccaagagcttcaaccggggcgagtgctaa

SEQ ID NO: 767 - DNA, 660 bp, Artificial Sequence
  4G2.2G6 light chain DNA sequence
gatgtcgtaatgactcaaacccccctgacccttagtgttactataggccagcccgcaagcatctcctgcaaatcctcccagtctcttctttatactgatggcaaaacctacttgtcctggtttttgcagcgcccaggtcaaagtcctaaacgtcttatttacttggtctctaaactcgattccggcgtgcctgaccggttctccggtagcggtagcggtaccgatttcactttgaagattagccgagttgaggcagaagacctcggggtctactactgccttcagagtacacacttcccacttacatttggcgcaggaaccaagttggaggttaaacggaccgtggccgcccccagcgtgttcatcttccctcccagcgacgagcagctgaagtctggcaccgccagcgtggtgtgcctgctgaacaacttctacccccgcgaggccaaggtgcagtggaaggtggacaacgccctgcagagcggcaacagccaggagagcgtgaccgagcaggactccaaggacagcacctacagcctgagcagcaccctgaccctgagcaaggccgactacgagaagcacaaggtgtacgcctgcgaggtgacccaccagggactgtctagccccgtgaccaagagcttcaaccggggcgagtgctaa

SEQ ID NO: 768 - DNA, 645 bp, Artificial Sequence
  6B3.2D3 light chain DNA sequence
agtattgtgatgacccagactcccaaattcctgcttgtatcagcaggagacagggttaccataacctgcaaggccagtcagagtgtgagtaatgatgtagcttggtaccaacagaagccagggcagtctcctaaattgttgatatattatgcatccaatcgctacactggagtccctgatcgcttcactggcagtggatatgggacggatttcactttcaccatcagcactgtgcaggctgaagacctggcagtttatttctgtcagcaggattatacctctccgtacacgttcggaggggggaccaagctggaaataaaacggaccgtggccgcccccagcgtgttcatcttccctcccagcgacgagcagctgaagtctggcaccgccagcgtggtgtgcctgctgaacaacttctacccccgcgaggccaaggtgcagtggaaggtggacaacgccctgcagagcggcaacagccaggagagcgtgaccgagcaggactccaaggacagcacctacagcctgagcagcaccctgaccctgagcaaggccgactacgagaagcacaaggtgtacgcctgcgaggtgacccaccagggactgtctagccccgtgaccaagagcttcaaccggggcgagtgctaa

SEQ ID NO: 769 - DNA, 645 bp, Artificial Sequence
  6H6.2D6 light chain DNA sequence
gacatccagatgacccagaccacctcctccctgtccgcctccctgggcgacagggtgaccatctcctgctccgcctcccagggcatctccaactacctgaactggtaccagcagaagcccgacggcaccgtgaagctgctgatctactacacctcctccctgcactccggcgtgccctccaggttctccggctccggctccggcaccgactactccctgaccatctccaacctggagcccgaggacatcgccacctactactgccagcagtactccgagctgccctacaccttcggctccggcaccaagctggagatcaagaggaccgtggccgcccccagcgtgttcatcttccctcccagcgacgagcagctgaagtctggcaccgccagcgtggtgtgcctgctgaacaacttctacccccgcgaggccaaggtgcagtggaaggtggacaacgccctgcagagcggcaacagccaggagagcgtgaccgagcaggactccaaggacagcacctacagcctgagcagcaccctgaccctgagcaaggccgactacgagaagcacaaggtgtacgcctgcgaggtgacccaccagggactgtctagccccgtgaccaagagcttcaaccggggcgagtgctaa

SEQ ID NO: 770 - DNA, 645 bp, Artificial Sequence
  9H2.2H10 light chain DNA sequence
gacattgtgatgacccagtctcacaaattcatgtccacatcagtaggagacagggtcagcatcacctgcaaggccagtcaggatgtgagtactgctgtagcctggtatcaacaaaaaccagggcaatctcctaaactactgatttactgggcatccacccggcacactggagtccctgatcgcttcacaggcagtggatctgggacagattatactctcaccatcagcagtgtgcaggctgaagacctggcactttattactgtcagcaacattataccactccgctcacgttcggtgctgggaccaagctggagctgaaacggaccgtggccgcccccagcgtgttcatcttccctcccagcgacgagcagctgaagtctggcaccgccagcgtggtgtgcctgctgaacaacttctacccccgcgaggccaaggtgcagtggaaggtggacaacgccctgcagagcggcaacagccaggagagcgtgaccgagcaggactccaaggacagcacctacagcctgagcagcaccctgaccctgagcaaggccgactacgagaagcacaaggtgtacgcctgcgaggtgacccaccagggactgtctagccccgtgaccaagagcttcaaccggggcgagtgctaa

SEQ ID NO: 771 - DNA, 645 bp, Artificial Sequence
  13G4.2F8 light chain DNA sequence
gacattgtgatgacccagtctcaaaaattcatgtccacatcagtaggagagagggtcagcatcacctgcaaggccagtcagaatgtaggtactaatgtagcctggtatcagcagaaagcagggcagtctcttgaactgctgatctatggggcatccaaccggcacactggagtccctgatcgcttcacaggcagtggatctgggacagatttcactctcaccatcaccaatgtgcagtctgaagacatgacaaattatttctgtgagcaatatagcaactttcctctcacgttcggtgctgggaccaagctggagctgaaacggaccgtggccgcccccagcgtgttcatcttccctcccagcgacgagcagctgaagtctggcaccgccagcgtggtgtgcctgctgaacaacttctacccccgcgaggccaaggtgcagtggaaggtggacaacgccctgcagagcggcaacagccaggagagcgtgaccgagcaggactccaaggacagcacctacagcctgagcagcaccctgaccctgagcaaggccgactacgagaagcacaaggtgtacgcctgcgaggtgacccaccagggactgtctagccccgtgaccaagagcttcaaccggggcgagtgctaa

SEQ ID NO: 772 - DNA, 660 bp, Artificial Sequence
  13H12.2F8 light chain DNA sequence
gacgttgttatgacacaaacaccacttacactttctgtaactatcggtcagcctgcctcaatttcatgtaagtcttctcagtccctgtttcatagcgacgggaagacttacctgaattggcttctccaacgaccaggccaatcacccaagcgccttatttatttggtcagtaaattggacagtggagttcccgatagatttaccgggagcggttctgggaccgatttcaccccaaagatctccagggtagaagacgaagatctcggtgtgtactattgctggcaggggacacatttccctctgacattcggtgctggaaccaaacttgagatgaaacggaccgtggccgcccccagcgtgttcatcttccctcccagcgacgagcagctgaagtctggcaccgccagcgtggtgtgcctgctgaacaacttctacccccgcgaggccaaggtgcagtggaaggtggacaacgccctgcagagcggcaacagccaggagagcgtgaccgagcaggactccaaggacagcacctacagcctgagcagcaccctgaccctgagcaaggccgactacgagaagcacaaggtgtacgcctgcgaggtgacccaccagggactgtctagccccgtgaccaagagcttcaaccggggcgagtgctaa

SEQ ID NO: 773 - DNA, 645 bp, Artificial Sequence
  15G7.2A7 light chain DNA sequence
gacatccagatgaaccagtctccatccagtctgtctgcatccctcggagacacaatttccatcacttgccgtgccagtcagaacattaatatttggttaagctggtaccagcagaaaccaggaaatattcctcaactattgatctataaggcttccaacttgcacacaggcgtcccctcaaggtttagtggcagtggatctggaacagatttcacattaaccatcagcagtctgcagcctgaagacattgccacttactactgtctacagggtcaaagttatcctctcacgttcggtgctgggaccaagctggtgatgaaacggaccgtggccgcccccagcgtgttcatcttccctcccagcgacgagcagctgaagtctggcaccgccagcgtggtgtgcctgctgaacaacttctacccccgcgaggccaaggtgcagtggaaggtggacaacgccctgcagagcggcaacagccaggagagcgtgaccgagcaggactccaaggacagcacctacagcctgagcagcaccctgaccctgagcaaggccgactacgagaagcacaaggtgtacgcctgcgaggtgacccaccagggactgtctagccccgtgaccaagagcttcaaccggggcgagtgctaa

SEQ ID NO: 774 - DNA, 654 bp, Artificial Sequence
  19D9.2E5 light chain DNA sequence
gatgttgtgatgacccagactccactcactttgtcggttaccattggacaaccagcctccatctcttgtaagtcaagtcagagcctcttacatagtgatggaaagacatatttgaattggttgttacagaggccaggccagcctccaaagcgcctaatgtatctggtgtctacactggactctggagtccctgacaggttcactggcagtggatcagggacagatttcacactgaaaatcagcagagtggaggctgaggatttgggagtttattattgctggcaaggtacacattttcctctcacgttcggtgctgggaccaagccggagcggaccgtggccgcccccagcgtgttcatcttccctcccagcgacgagcagctgaagtctggcaccgccagcgtggtgtgcctgctgaacaacttctacccccgcgaggccaaggtgcagtggaaggtggacaacgccctgcagagcggcaacagccaggagagcgtgaccgagcaggactccaaggacagcacctacagcctgagcagcaccctgaccctgagcaaggccgactacgagaagcacaaggtgtacgcctgcgaggtgacccaccagggactgtctagccccgtgaccaagagcttcaaccggggcgagtgctaa

SEQ ID NO: 775 - DNA, 654 bp, Artificial Sequence
  23B10.2B12 light chain DNA sequence
gatattgtgatgacgcaggctgcattctccaatccagtcactcttggaacgtcagcttccatctcctgcaggtctagtaagagtctcctacatagtgatggcatcacttatttctattggtatctgcagaggccaggccagtctcctcagctcctgatatatcggatgtccaaccttgcctcaggagtcccagacaggttcagtggcagtgggtcaggaactgatttcacactgagaatcagcagagtggaggctgaggatgtgggtgtttattactgtgctcaaatgctagaattcccgctcacgttcggtgctgggaccaagctggagcggaccgtggccgcccccagcgtgttcatcttccctcccagcgacgagcagctgaagtctggcaccgccagcgtggtgtgcctgctgaacaacttctacccccgcgaggccaaggtgcagtggaaggtggacaacgccctgcagagcggcaacagccaggagagcgtgaccgagcaggactccaaggacagcacctacagcctgagcagcaccctgaccctgagcaaggccgactacgagaagcacaaggtgtacgcctgcgaggtgacccaccagggactgtctagccccgtgaccaagagcttcaaccggggcgagtgctaa

SEQ ID NO: 776 - DNA, 645 bp, Artificial Sequence
  24D12.2H9 light chain DNA sequence
gacattgtgatgacccagtctcacaaattcatgtccacatcagtaggagacagggtcagcatcacctgcaaggccagtcaggatgtgcgtactgctgtagcctggtatcaacagaaaccagggcaatctcctaaactactgatttactgggcatccacccggcacactggagtccctgatcgcttcacaggcagtggatctgggacagatttcactctcacccttagcaatgtgcagtctgaagacttggcagattatttctgtcagcaatatagtagttatccgtggacgttcggtggaggcaccaagctggaaatcaaacggaccgtggccgcccccagcgtgttcatcttccctcccagcgacgagcagctgaagtctggcaccgccagcgtggtgtgcctgctgaacaacttctacccccgcgaggccaaggtgcagtggaaggtggacaacgccctgcagagcggcaacagccaggagagcgtgaccgagcaggactccaaggacagcacctacagcctgagcagcaccctgaccctgagcaaggccgactacgagaagcacaaggtgtacgcctgcgaggtgacccaccagggactgtctagccccgtgaccaagagcttcaaccggggcgagtgctaa

SEQ ID NO: 777 - DNA, 660 bp, Artificial Sequence
  F846C.1B2 light chain DNA sequence
aacatttggttgacacagtcgccatcatctctggctgtgtctgcaggagaaatggtcactatgacctgtaagtccagtcaaagtgttttatacagttcaaatcagaagaactacttggcctggtaccagcagaaaccagggcagtctcctaaactgctgatctactgggcatccactagggaatctggtgtccctgatcgcttcacaggcagtggatctgggacagacttttctcttaccatcagcagtgtacaagctgaagacctggcagtttattactgtcatcaatatctctcctcgctcacgttcggtgctgggaccaagctggagctgaaacggaccgtggccgcccccagcgtgttcatcttccctcccagcgacgagcagctgaagtctggcaccgccagcgtggtgtgcctgctgaacaacttctacccccgcgaggccaaggtgcagtggaaggtggacaacgccctgcagagcggcaacagccaggagagcgtgaccgagcaggactccaaggacagcacctacagcctgagcagcaccctgaccctgagcaaggccgactacgagaagcacaaggtgtacgcctgcgaggtgacccaccagggactgtctagccccgtgaccaagagcttcaaccggggcgagtgctaa

SEQ ID NO: 778 - DNA, 660 bp, Artificial Sequence
  F846C.1F5 light chain DNA sequence
aacattatgatgacacagtcgccatcatctctggctgtgtctgcaggagaaaaggtcactatgagctgtaagtccagtcaaagtgttttatacagttcaaatcagaagaactacttggcctggtaccagcagaaaccagggcagtctcctaaactgctgatctactgggcatccactagggaatctggtgtccctgatcgcttcacaggcagtggatctgggacagattttactcttaccatcagcagtgtacaacctgaagacctggcagtttattactgtcatcaatacctctcctcgctcacgttcggtgctgggaccaagctggagctgaaacggaccgtggccgcccccagcgtgttcatcttccctcccagcgacgagcagctgaagtctggcaccgccagcgtggtgtgcctgctgaacaacttctacccccgcgaggccaaggtgcagtggaaggtggacaacgccctgcagagcggcaacagccaggagagcgtgaccgagcaggactccaaggacagcacctacagcctgagcagcaccctgaccctgagcaaggccgactacgagaagcacaaggtgtacgcctgcgaggtgacccaccagggactgtctagccccgtgaccaagagcttcaaccggggcgagtgctaa

SEQ ID NO: 779 - DNA, 660 bp, Artificial Sequence
  F846C.1H12 light chain DNA sequence
aacattatgatgacacagtcgccatcatctctggctgtgtctgcaggacaaaaggtcactatgagctgtaagtccagtcaaagtgttttatacagttcaagtcagaagaactacttggcctggtaccagcagaaaccagggcagtctcctaaacttctgatctactgggcatccactagggaatctggtgtccctgatcgcttctcaggcagtggatctgggacagattttactcttaccatcagcagtgtacaacctgaagacctggcagtttattactgtcatcaatacctctcctcgctcacgttcggtgctgggaccaagctggagctgaaacggaccgtggccgcccccagcgtgttcatcttccctcccagcgacgagcagctgaagtctggcaccgccagcgtggtgtgcctgctgaacaacttctacccccgcgaggccaaggtgcagtggaaggtggacaacgccctgcagagcggcaacagccaggagagcgtgaccgagcaggactccaaggacagcacctacagcctgagcagcaccctgaccctgagcaaggccgactacgagaagcacaaggtgtacgcctgcgaggtgacccaccagggactgtctagccccgtgaccaagagcttcaaccggggcgagtgctaa

SEQ ID NO: 780 - DNA, 663 bp, Artificial Sequence
  F846C.1H5 light chain DNA sequence
gatgttgtgatgacccaaactccactctccctgcctgtcagtcttggagatcaagcctccatctcttgcagatctagtcagagccttgtacacaatagtggaaacacctatttacattggtacctgcagaggccaggccagtctccaaacctcctgatctacaaagtttccaaccgattttctggggtcccagacaggttcagtggcagtggatcagggacagatttcacactcaagatcagcagagtggcggctgaggatctgggagtttatttctgctctcaaagtacacatgttcctccgacgttcggtggaggcaccaagctggaaatcaaacggaccgtggccgcccccagcgtgttcatcttccctcccagcgacgagcagctgaagtctggcaccgccagcgtggtgtgcctgctgaacaacttctacccccgcgaggccaaggtgcagtggaaggtggacaacgccctgcagagcggcaacagccaggagagcgtgaccgagcaggactccaaggacagcacctacagcctgagcagcaccctgaccctgagcaaggccgactacgagaagcacaaggtgtacgcctgcgaggtgacccaccagggactgtctagccccgtgaccaagagcttcaaccggggcgagtgctaagga

SEQ ID NO: 781 - DNA, 660 bp, Artificial Sequence; identical to SEQ ID NO: 778
  F846C.2H3 light chain DNA sequence

SEQ ID NO: 782 - DNA, 651 bp, Artificial Sequence
  F846TC.14A2 light chain DNA sequence
caggctgttgtgactcaggaatctgcactcaccacatcacctggtgaaacagtcacactcacttgtcgctcaagtactggggctgttacaactagtaactatgccaactgggtccaagaaaaaccagatcatttattcactggtctaataggtggtatcaataaccgagttccaggtgttcctgccagattctcaggctccctgattggagacaaggcagccctcaccatcacaggggcacagactgaggatgaggcaatatatttctgtgctctatggtatagcaaccattgggtgttcggtggaggaaccaaactgactgtcctacggaccgtggccgcccccagcgtgttcatcttccctcccagcgacgagcagctgaagtctggcaccgccagcgtggtgtgcctgctgaacaacttctacccccgcgaggccaaggtgcagtggaaggtggacaacgccctgcagagcggcaacagccaggagagcgtgaccgagcaggactccaaggacagcacctacagcctgagcagcaccctgaccctgagcaaggccgactacgagaagcacaaggtgtacgcctgcgaggtgacccaccagggactgtctagccccgtgaccaagagcttcaaccggggcgagtgctaa

SEQ ID NO: 783 - DNA, 660 bp, Artificial Sequence
  F846TC.14E4 light chain DNA sequence
gatattgtgatgacgcaggctgcattctccaatccagtcactcttggaacatcagcttccatctcctgcaggtctagtaagagtctcctacatactaatggcatcacttttttgtattggtatctgcagaagccaggccagtctcctcagcccctgatttatcagatgtccaaccttgcctcaggagtcccagacaggttcagtagcagtgggtcaggaactgatttcacactgagaatcagcagagtggaggctgaggatgtgggtgtttattactgtgctcaaaatctagaacttccttggacgttcggtggaggcaccaagctggaaatcaatcggaccgtggccgcccccagcgtgttcatcttccctcccagcgacgagcagctgaagtctggcaccgccagcgtggtgtgcctgctgaacaacttctacccccgcgaggccaaggtgcagtggaaggtggacaacgccctgcagagcggcaacagccaggagagcgtgaccgagcaggactccaaggacagcacctacagcctgagcagcaccctgaccctgagcaaggccgactacgagaagcacaaggtgtacgcctgcgaggtgacccaccagggactgtctagccccgtgaccaagagcttcaaccggggcgagtgctaa

SEQ ID NO: 784 - DNA, 660 bp, Artificial Sequence
  F846TC.16B5 light chain DNA sequence
aacattatgatgacacagtcgccatcatctctggctgtgtctgcaggagaaaaggtcactatgagctgtaagtccagtcaaagtgttttatacagttcaaatcagaagaactacttggcctggtaccagcagaaaccagggcagtctcctaaactactgatctactgggcatccactagggaatctggtgtccctgatcgcttcacaggcagtggatctgggacagattttactcttaccatcagcagtgtacaagctgaagacctggcagtttattactgtcatcaatacctctcctcgctcacgttcggtgctgggaccaagctggagctgaaacggaccgtggccgcccccagcgtgttcatcttccctcccagcgacgagcagctgaagtctggcaccgccagcgtggtgtgcctgctgaacaacttctacccccgcgaggccaaggtgcagtggaaggtggacaacgccctgcagagcggcaacagccaggagagcgtgaccgagcaggactccaaggacagcacctacagcctgagcagcaccctgaccctgagcaaggccgactacgagaagcacaaggtgtacgcctgcgaggtgacccaccagggactgtctagccccgtgaccaagagcttcaaccggggcgagtgctaa

SEQ ID NO: 785 - DNA, 663 bp, Artificial Sequence
  F846TC.7F10 light chain DNA sequence
gacattgtgatgacacagtctccatcctccctggctatgtcagtaggacagaaggtcactatgagctgcaagtccagtcagagccttttaaatagtagcaatcaaaagaactatttggcctggtaccagcagaaaccaggacagtctcctaaacttctggtatactttgcatccactagggaatctggggtccctgatcgcttcataggcagtggatctgggacagatttcactcttaccatcagcagtgtgcaggctgaagacctggcagattacttctgtcagcaacattatagcactccgtacacgttcggagggggggccaagctggaaataaaacggaccgtggccgcccccagcgtgttcatcttccctcccagcgacgagcagctgaagtctggcaccgccagcgtggtgtgcctgctgaacaacttctacccccgcgaggccaaggtgcagtggaaggtggacaacgccctgcagagcggcaacagccaggagagcgtgaccgagcaggactccaaggacagcacctacagcctgagcagcaccctgaccctgagcaaggccgactacgagaagcacaaggtgtacgcctgcgaggtgacccaccagggactgtctagccccgtgaccaagagcttcaaccggggcgagtgctaa

SEQ ID NO: 786 - DNA, 645 bp, Artificial Sequence
  F847C.10B9 light chain DNA sequence
gacatccggatgactcagtctccatccagtctgtctgcatcccttggagacacaattaccatcacttgccatgccagtcagaacattaatgtttggttaagctggtaccagcagaaaccaggaaatattcctaaactattgatctataaggcttccaacttgcacacaggcgtcccatcaaggtttagtggcagtggatctggaacaggtttcacattaaccatcagcagcctgcagcctgaagacattgccacttactactgtcaacagggtcaaagttatccgtacacgttcggaggggggaccaagctggagctgaaacggaccgtggccgcccccagcgtgttcatcttccctcccagcgacgagcagctgaagtctggcaccgccagcgtggtgtgcctgctgaacaacttctacccccgcgaggccaaggtgcagtggaaggtggacaacgccctgcagagcggcaacagccaggagagcgtgaccgagcaggactccaaggacagcacctacagcctgagcagcaccctgaccctgagcaaggccgactacgagaagcacaaggtgtacgcctgcgaggtgacccaccagggactgtctagccccgtgaccaagagcttcaaccggggcgagtgctaa

SEQ ID NO: 787 - DNA, 645 bp, Artificial Sequence
  F847C.11B1 light chain DNA sequence
gaaattgtgttgacccagtctccagcatccctgtccgtgactacaggagaaaaagtcactatcagatgcataaccagcattgatattgatgatgatatgaactggtaccagcagaagccaggggaacctcctaagctccttatttcagaaggcaatactcttcgtcctggagtcccatcccgattctccagcagtggctatggcacagattttgtttttacaattgaaaacacgctctcagaagatgttgcagattactactgtttgcaaagtgataacaagcctctcacgttcggtgctgggaccaagctggagctgaaacggaccgtggccgcccccagcgtgttcatcttccctcccagcgacgagcagctgaagtctggcaccgccagcgtggtgtgcctgctgaacaacttctacccccgcgaggccaaggtgcagtggaaggtggacaacgccctgcagagcggcaacagccaggagagcgtgaccgagcaggactccaaggacagcacctacagcctgagcagcaccctgaccctgagcaaggccgactacgagaagcacaaggtgtacgcctgcgaggtgacccaccagggactgtctagccccgtgaccaagagcttcaaccggggcgagtgctaa

SEQ ID NO: 788 - DNA, 645 bp, Artificial Sequence
  F847C.12F12 light chain DNA sequence
gacatccaggtgattcagtctccatccagtctgtctgcatcccttggagacacaattaccatcacttgccatgccagtcagaacattaatgtttggttaagctggtaccagcagaaaccaggaaatattcctaaactattgatctataaggcttccaacttgcacacaggcgtcccatcaaggtttagtggcagtggatctggaacaggtttcacattaaccatcagcagcctgcagcctgaagacattgccacttactactgtcaacagggtcaaagttatccgtacacgttcggaggggggaccaagctggagctgaaacggaccgtggccgcccccagcgtgttcatcttccctcccagcgacgagcagctgaagtctggcaccgccagcgtggtgtgcctgctgaacaacttctacccccgcgaggccaaggtgcagtggaaggtggacaacgccctgcagagcggcaacagccaggagagcgtgaccgagcaggactccaaggacagcacctacagcctgagcagcaccctgaccctgagcaaggccgactacgagaagcacaaggtgtacgcctgcgaggtgacccaccagggactgtctagccccgtgaccaagagcttcaaccggggcgagtgctaa

SEQ ID NO: 789 - DNA, 646 bp, Artificial Sequence
  F847C.26F5 light chain DNA sequence
gaaattaagatgaaccagtctccatccagtctgtctgcatcccttggagacacaattaccatcacttgccatgccagtcagaacattaatgtttggttaagctggtaccagcagaaaccaggaaatattcctaaactattgatctataaggcttccaacttgcacacaggcgtcccatcaaggtttagtggcagtggatctggaacaggtttcacattaaccatcagcagcctacagcctgaagacattgccacttactactgtcaacagggtcaaagttatccgtacacgttcggaggggggaccaagctggagctgaaaaggaccgtggccgcccccagcgtgttcatcttccctcccagcgacgagcagctgaagtctggcaccgccagcgtggtgtgcctgctgaacaacttctacccccgcgaggccaaggtgcagtggaaggtggacaacgccctgcagagcggcaacagccaggagagcgtgaccgagcaggactccaaggacagcacctacagcctgagcagcaccctgaccctgagcaaggccgactacgagaagcacaaggtgtacgcctgcgaggtgacccaccagggactgtctagccccgtgaccaagagcttcaaccggggcgagtgctaag

SEQ ID NO: 790 - DNA, 651 bp, Artificial Sequence
  F847C.4B10 light chain DNA sequence
caggctgttgtgactcaggaatctgcactcaccacatcacctggtgaaacagtcacactcacttgtcgctcaagtactggggctgttacaactagtaactatgccaactgggtccaagaaaaaccagatcatttattcactggtctaataggtggtaccaacaaccgagctccaggtgttcctgccagattctcaggctccctgattggagacaaggctgccctcaccatcacaggggcacagactgaggatgaggcaatatatttctgtgctctatggtacagcaaccatttagtgttcggtggaggaaccaaactgactgtcctaaggaccgtggccgcccccagcgtgttcatcttccctcccagcgacgagcagctgaagtctggcaccgccagcgtggtgtgcctgctgaacaacttctacccccgcgaggccaaggtgcagtggaaggtggacaacgccctgcagagcggcaacagccaggagagcgtgaccgagcaggactccaaggacagcacctacagcctgagcagcaccctgaccctgagcaaggccgactacgagaagcacaaggtgtacgcctgcgaggtgacccaccagggactgtctagccccgtgaccaagagcttcaaccggggcgagtgctaa

SEQ ID NO: 791 - DNA, 660 bp, Artificial Sequence
  F849C.8D10 light chain DNA sequence
gatgttttgatgacccaaactccactctccctgcctgtcagtcttggagatcaagcctccatctcttgcagatctagtcaggacattgtgcatagtagtggaaacacctatttagaatggtacctgcagaaaccaggccagtctctaaagctcctgatttacaaagtttccaaccgattttctggggtcccagacaggttcagtgccagtggatcagggacagatttcacactcaagatcagcagagtggaggctgaggatctgggagtttattactgctttcaaggttcacatgttcctcccacgttcggctcggggacaaagttggaaataaaacggaccgtggccgcccccagcgtgttcatcttccctcccagcgacgagcagctgaagtctggcaccgccagcgtggtgtgcctgctgaacaacttctacccccgcgaggccaaggtgcagtggaaggtggacaacgccctgcagagcggcaacagccaggagagcgtgaccgagcaggactccaaggacagcacctacagcctgagcagcaccctgaccctgagcaaggccgactacgagaagcacaaggtgtacgcctgcgaggtgacccaccagggactgtctagccccgtgaccaagagcttcaaccggggcgagtgctaa

SEQ ID NO: 792 - DNA, 660 bp, Artificial Sequence
  F849C.8H3 light chain DNA sequence
gatattgggatgaggcaggctgcattctccaatccagtcactcttggaacatcagcttccatctcctgcaggtctagtaagagtctcctatatagtaatggcatcacttatttgtattggtttctccagaagccaggccagtctcctcagctcctgatttatcagatgtccaaccttgcctcaggagtcccagacaggttcagtagcagtgggtcaggaactgatttcacactgagaatcagcagagtggaggctgacgatgtgggtgtttattactgtgctcaaaatctagaacttccgtggacgttcggtggaggcaccaagctggaaatcaaacggaccgtggccgcccccagcgtgttcatcttccctcccagcgacgagcagctgaagtctggcaccgccagcgtggtgtgcctgctgaacaacttctacccccgcgaggccaaggtgcagtggaaggtggacaacgccctgcagagcggcaacagccaggagagcgtgaccgagcaggactccaaggacagcacctacagcctgagcagcaccctgaccctgagcaaggccgactacgagaagcacaaggtgtacgcctgcgaggtgacccaccagggactgtctagccccgtgaccaagagcttcaaccggggcgagtgctaa

SEQ ID NO: 793 - DNA, 657 bp, Artificial Sequence
  846.2B11 light chain DNA sequence
gacattgtgctgacacagtctcctgcttccttaggtgtttctctggggcagagggccaccatctcatgcagggccagcaaaagtgtcagtacatctggctatagttatatgcactggtaccaacagaaaccaggacagccacccaaactcctcatctatcttgcatccatcctagaatctggggtccctgccaggttcagtggcagtgggtctgggacagacttcaccctcaacatccatcctgtggaggaggaggatgctgcaatctattactgtcagcacagtagggagcttcctctcacgttcggtgctgggaccaagctggagctgaaacggaccgtggccgcccccagcgtgttcatcttccctcccagcgacgagcagctgaagtctggcaccgccagcgtggtgtgcctgctgaacaacttctacccccgcgaggccaaggtgcagtggaaggtggacaacgccctgcagagcggcaacagccaggagagcgtgaccgagcaggactccaaggacagcacctacagcctgagcagcaccctgaccctgagcaaggccgactacgagaagcacaaggtgtacgcctgcgaggtgacccaccagggactgtctagccccgtgaccaagagcttcaaccggggcgagtgctaa

SEQ ID NO: 794 - DNA, 657 bp, Artificial Sequence
  846.4D5 light chain DNA sequence
aacattgtgctgacccaatctccagcttctttggctgtgtctctagggcagagggccaccatatcctgcagagccagtgaaagtgttgatagttatggcaatagttttatgcactggtaccagcagaaaccaggacagccacccaaactcctcatctatcttgcatccaacctagaatctggggtccctgccaggttcagtggcagtgggtctaggacagacttcaccctcaccattgatcctgtggaggctgatgatgctgcaacctattactgtcagcaaaataatgaggatccgtggacgttcggtggaggcaccaagctggaaatcaaacggaccgtggccgcccccagcgtgttcatcttccctcccagcgacgagcagctgaagtctggcaccgccagcgtggtgtgcctgctgaacaacttctacccccgcgaggccaaggtgcagtggaaggtggacaacgccctgcagagcggcaacagccaggagagcgtgaccgagcaggactccaaggacagcacctacagcctgagcagcaccctgaccctgagcaaggccgactacgagaagcacaaggtgtacgcctgcgaggtgacccaccagggactgtctagccccgtgaccaagagcttcaaccggggcgagtgctaa

SEQ ID NO: 795 - DNA, 660 bp, Artificial Sequence
  846T.1H2 light chain DNA sequence
gatgttgtgatgacccagactccactcactttgtcggttaccattggacaaccagcctctatctcttgcaagtcaagtcagagtctcttatatagtaatggaaaaacctatttgaattggttattacagaggccaggccagtctccaaagcgcctaatctatctggtgtctaaactggactctggagtccctgacaggttcactggcagtggatcaggaacagattttacactgaaaatcagcagagtggaggctgaggatttgggagtttattactgcgtgcaaggtacacattttcctcagacgttcggtggaggcaccaagctggaaataaaaaggaccgtggccgcccccagcgtgttcatcttccctcccagcgacgagcagctgaagtctggcaccgccagcgtggtgtgcctgctgaacaacttctacccccgcgaggccaaggtgcagtggaaggtggacaacgccctgcagagcggcaacagccaggagagcgtgaccgagcaggactccaaggacagcacctacagcctgagcagcaccctgaccctgagcaaggccgactacgagaagcacaaggtgtacgcctgcgaggtgacccaccagggactgtctagccccgtgaccaagagcttcaaccggggcgagtgctaa

SEQ ID NO: 796 - DNA, 651 bp, Artificial Sequence; identical to SEQ ID NO: 790
  847.14H4 light chain DNA sequence

SEQ ID NO: 797 - DNA, 360 bp, Artificial Sequence
  2D10.2B2 VH DNA sequence
caggtccagctgcagcagtctggacctgagctggtgaagcctggggcttcagtgaagatatcctgcaaggcttctggctacaccttcactgactactatataaactgggtgaagcagaggcctggacagggacttgagtggattggatggatttatcctggaagcaatgataccaagtacaatgagaagttcaagggcaaggccacattgactgtagacacatcctccagcacggcctacatgcagctcggcagcctgacctctgaggactctgcggtctatttctgtgcgaattacttcggttgtagcgggtggttcttcgatgtctggggcacagggaccacagtcaccgtctcctca

SEQ ID NO: 798 - DNA, 336 bp, Artificial Sequence
  2D10.2B2 VL DNA sequence
gatattgtgatgacgcaggctgcattctccaatccagtcactcttggaacgtcagcttccatctcctgcaggtctagtaagagtctcctacatagtgatggcatcacttatttgtattggtatctgcagaggccaggccagtctcctcagctcctgatatatcggatgtccaaccttgcctcaggagtcccagacaggttcagtggcagtgggtcaggaactgatttcacactgagaatcagcagagtggaggctgaggatgtgggtgtttattactgtgctcaaatgatagaattcccgctcacgttcggtgctgggaccatcctggagctgaaa

SEQ ID NO: 799 - DNA, 1356 bp, Artificial Sequence
  2D10.2B2 heavy chain DNA sequence
caggtccagctgcagcagtctggacctgagctggtgaagcctggggcttcagtgaagatatcctgcaaggcttctggctacaccttcactgactactatataaactgggtgaagcagaggcctggacagggacttgagtggattggatggatttatcctggaagcaatgataccaagtacaatgagaagttcaagggcaaggccacattgactgtagacacatcctccagcacggcctacatgcagctcggcagcctgacctctgaggactctgcggtctatttctgtgcgaattacttcggttgtagcgggtggttcttcgatgtctggggcacagggaccacagtcaccgtctcctcagctaagactactcctcccagtgtctaccccctggcccccgtgtgcggcgacacaacaggctcctccgtgacactgggctgcctggtgaaaggctacttccccgagcccgtgacactgacatggaactccggctccctgtcctccggcgtgcacacattccccgccgtgctgcagtccgacctgtacacactgtcctcctccgtgacagtgacatcctccacatggccctcccagtccatcacatgcaacgtggcccaccccgcctcctccacaaaagtggacaaaaaaatcgagcccaggggccccacaatcaaaccctgccccccctgcaaatgccccgcccccaacgccgccggcggcccctccgtgttcatcttcccccccaaaatcaaagacgtgctgatgatctccctgtcccccatcgtgacatgcgtggtggtggacgtgtccgaggacgaccccgacgtgcagatctcctggttcgtgaacaacgtggaggtgcacacagcccagacacagacacacagggaggactacaactccacactgagggtggtgtccgccctgcccatccagcaccaggactggatgtccggcaaagagttcaaatgcaaagtgaacaacaaagacctgggcgcccccatcgagaggacaatctccaaacccaaaggctccgtgagggccccccaggtgtacgtgctgcccccccccgaggaggagatgacaaaaaaacaggtgacactgacatgcatggtgacagacttcatgcccgaggacatctacgtggagtggacaaacaacggcaaaacagagctgaactacaaaaacacagagcccgtgctggactccgacggctcctacttcatgtactccaaactgagggtggagaaaaaaaactgggtggagaggaactcctactcctgctccgtggtgcacgagggcctgcacaaccaccacacaacaaaatccttctccaggacacccggcaaatagtaa

SEQ ID NO: 800 - DNA, 663 bp, Artificial Sequence
  2D10.2B2 light chain DNA sequence
gatattgtgatgacgcaggctgcattctccaatccagtcactcttggaacgtcagcttccatctcctgcaggtctagtaagagtctcctacatagtgatggcatcacttatttgtattggtatctgcagaggccaggccagtctcctcagctcctgatatatcggatgtccaaccttgcctcaggagtcccagacaggttcagtggcagtgggtcaggaactgatttcacactgagaatcagcagagtggaggctgaggatgtgggtgtttattactgtgctcaaatgatagaattcccgctcacgttcggtgctgggaccatcctggagctgaaacgtgctgatgttgcccctactgtgtccatcttccccccctcctccgagcagctgacatccggcggcgcctccgtggtgtgcttcctgaacaacttctaccccaaagacatcaacgtgaaatggaaaatcgacggctccgagaggcagaacggcgtgctgaactcctggacagaccaggactccaaagactccacatactccatgtcctccacactgacactgacaaaagacgagtacgagaggcacaactcctacacatgcgaggccacacacaaaacatccacatcccccatcgtgaaatccttcaacaggaacgagtgctaataa

SEQ ID NO: 801 - protein, 8 aa, Artificial Sequence
  VH_CDR2_42
IYPGSQDT

SEQ ID NO: 802 - protein, 13 aa, Artificial Sequence
  VH_CDR3_59
ANYFGSSGWFFDV

SEQ ID NO: 803 - protein, 120 aa, Artificial Sequence
  VH-79
QFQLQQSGPELVKPGASVKISCKASGYTFTDYYINWVKQRPGQGLEWIGWIYPGSNDTKYNEKFKGKATLTVDTSSSTAYMQLGSLTSEDSAVYFCANYFGCSGWFFDVWGTGTTVTVSS

SEQ ID NO: 804 - protein, 446 aa, Artificial Sequence
  2D10-VH0-VL0 heavy chain peptide sequence
QFQLQQSGPELVKPGASVKISCKASGYTFTDYYINWVKQRPGQGLEWIGWIYPGSNDTKYNEKFKGKATLTVDTSSSTAYMQLGSLTSEDSAVYFCANYFGCSGWFFDVWGTGTTVTVSSASTKGPSVFPLAPCSRSTSESTAALGCLVKDYFPEPVTVSWNSGALTSGVHTFPAVLQSSGLYSLSSVVTVPSSSLGTKTYTCNVDHKPSNTKVDKRVESKYGPPCPPCPAPEFLGGPSVFLFPPKPKDTLMISRTPEVTCVVVDVSQEDPEVQFNWYVDGVEVHNAKTKPREEQFNSTYRVVSVLTVLHQDWLNGKEYKCKVSNKGLPSSIEKTISKAKGQPREPQVYTLPPSQEEMTKNQVSLTCLVKGFYPSDIAVEWESNGQPENNYKTTPPVLDSDGSFFLYSRLTVDKSRWQEGNVFSCSVMHEALHNHYTQKSLSLSLG

SEQ ID NO: 805 - protein, 219 aa, Artificial Sequence
  2D10-VH0-VL0 light chain peptide sequence
DIVMTQAAFSNPVTLGTSASISCRSSKSLLHSDGITYLYWYLQRPGQSPQLLIYRMSNLASGVPDRFSGSGSGTDFTLRISRVEAEDVGVYYCAQMIEFPLTFGAGTILELKRTVAAPSVFIFPPSDEQLKSGTASVVCLLNNFYPREAKVQWKVDNALQSGNSQESVTEQDSKDSTYSLSSTLTLSKADYEKHKVYACEVTHQGLSSPVTKSFNRGEC

SEQ ID NO: 806 - protein, 120 aa, Artificial Sequence
  VH-80 Peptide Sequence
QVQLVQSGAEVKKPGASVKVSCKASGYTFTDYYINWVRQAPGQRLEWMGWIYPGSQDTKYNEKFQGRVTLTVDTSASTAYMELSSLRSEDTAVYFCANYFGSSGWFFDVWGQGTMVTVSS

SEQ ID NO: 807 - protein, 120 aa, Artificial Sequence; identical to SEQ ID NO: 806
  VH-81 Peptide Sequence

SEQ ID NO: 808 - protein, 120 aa, Artificial Sequence; identical to SEQ ID NO: 806
  VH-82 Peptide Sequence

SEQ ID NO: 809 - protein, 120 aa, Artificial Sequence; identical to SEQ ID NO: 806
  VH-83 Peptide Sequence

SEQ ID NO: 810 - protein, 120 aa, Artificial Sequence
  VH-84 Peptide Sequence
QVQLVQSGAEVKKPGASVKVSCKASGYTFTDYYINWVRQAPGQRLEWMGWIYPGSQDTKYSQKFQGRVTITVDTSASTAYMELSSLRSEDTAVYYCANYFGSSGWFFDVWGQGTMVTVSS

SEQ ID NO: 811 - protein, 120 aa, Artificial Sequence; identical to SEQ ID NO: 810
  VH-85 Peptide Sequence

SEQ ID NO: 812 - protein, 120 aa, Artificial Sequence; identical to SEQ ID NO: 810
  VH-86 Peptide Sequence

SEQ ID NO: 813 - protein, 120 aa, Artificial Sequence; identical to SEQ ID NO: 810
  VH-87 Peptide Sequence

SEQ ID NO: 814 - protein, 116 aa, Artificial Sequence
  VH-88 Peptide Sequence
QIQLVQSGSELKKPGASVKVSCKASGYAFTTYGMSWVRQAPGQGLEWMGWVNTYSGVPTYADDFTGRFVFSLETSVSTAYLQISSLKAEDTAVYFCARGPYAMDYWGQGTLVTVSS

SEQ ID NO: 815 - protein, 116 aa, Artificial Sequence; identical to SEQ ID NO: 814
  VH-89 Peptide Sequence

SEQ ID NO: 816 - protein, 116 aa, Artificial Sequence
  VH-90 Peptide Sequence
QIQLVQSGSELKKPGASVKVSCKASGYAFTTYGMSWVRQAPGQGLEWMGWVNTYSGVPTSADDFTGRFVFSLETSVSTAYLQISSLKAEDTAVYFCARGPYAMDYWGQGTLVTVSS

SEQ ID NO: 817 - protein, 116 aa, Artificial Sequence
  VH-91 Peptide Sequence
QVQLVQSGFELKKPGASVKISCKASGYAFTTYGMSWVRQAPGQGLEWMGWVNTYSGVPTYAQAFTGRFVFSLDTSVSTAYLQISSLKAEDTAVYYCARGPYAMDYWGQGTLVTVSS

SEQ ID NO: 818 - protein, 116 aa, Artificial Sequence; identical to SEQ ID NO: 817
  VH-92 Peptide Sequence

SEQ ID NO: 819 - protein, 116 aa, Artificial Sequence
  VH-93 Peptide Sequence
QVQLVQSGFELKKPGASVKISCKASGYAFTTYGMSWVRQAPGQGLEWMGWVNTYSGVPTSAQAFTGRFVFSLDTSVSTAYLQISSLKAEDTAVYYCARGPYAMDYWGQGTLVTVSS

SEQ ID NO: 820 - protein, 116 aa, Artificial Sequence; identical to SEQ ID NO: 819
  VH-94 Peptide Sequence

SEQ ID NO: 821 - protein, 112 aa, Artificial Sequence
  VL-78 Peptide Sequence
DIVMTQSPLSLPVTPGEPASISCRSSKSLLHSDGITYLYWYLQKPGQSPQLLIYRMSNRASGVPDRFSGSGSGTDFTLKISRVEAEDVGVYYCAQMIEFPLTFGQGTKLEIK

SEQ ID NO: 822 - protein, 112 aa, Artificial Sequence
  VL-79 Peptide Sequence
DIVMTQSPLSLPVTPGEPASISCRSSKSLLHSDGITYLYWYLQKPGQSPQLLIYRMSNLASGVPDRFSGSGSGTDFTLKISRVEAEDVGVYYCAQMIEFPLTFGQGTKLEIK

SEQ ID NO: 823 - protein, 112 aa, Artificial Sequence
  VL-80 Peptide Sequence
DVVMTQSPLSLPVTLGQPASISCRSSKSLLHSDGITYLYWYQQRPGQSPRLLIYRMSNRDSGVPDRFSGSGSGTDFTLKISRVEAEDVGVYYCAQMIEFPLTFGQGTKLEIK

SEQ ID NO: 824 - protein, 112 aa, Artificial Sequence
  VL-81 Peptide Sequence
DIVMTQSPLSLPVTLGQPASISCRSSKSLLHSDGITYLYWYQQRPGQSPQLLIYRMSNLDSGVPDRFSGSGSGTDFTLKISRVEAEDVGVYYCAQMIEFPLTFGQGTKLEIK

SEQ ID NO: 825 - protein, 112 aa, Artificial Sequence; identical to SEQ ID NO: 821
  VL-82 Peptide Sequence

SEQ ID NO: 826 - protein, 112 aa, Artificial Sequence; identical to SEQ ID NO: 822
  VL-83 Peptide Sequence

SEQ ID NO: 827 - protein, 112 aa, Artificial Sequence; identical to SEQ ID NO: 823
  VL-84 Peptide Sequence

SEQ ID NO: 828 - protein, 112 aa, Artificial Sequence; identical to SEQ ID NO: 824
  VL-85 Peptide Sequence

SEQ ID NO: 829 - protein, 107 aa, Artificial Sequence
  VL-86 Peptide Sequence
DIQMTQSPSSLSASVGDRVTITCQASQDISNYLNWYQQKPGKAPKLLIYYTSSLLTGVPSRFSGSGSGTDYTFTISSLQPEDIATYYCQQYSKLPYTFGQGTKLEIK

SEQ ID NO: 830 - protein, 107 aa, Artificial Sequence
  VL-87 Peptide Sequence
DIQMTQSPSSLSASVGDRVTITCRASQDISNYLNWYQQKPGKAPKLLIYYTSSLLSGVPSRFSGSGSGTDYTLTISSLQPEDFATYYCQQYSKLPYTFGQGTKLEIK

SEQ ID NO: 831 - protein, 107 aa, Artificial Sequence; identical to SEQ ID NO: 829
  VL-88 Peptide Sequence

SEQ ID NO: 832 - protein, 107 aa, Artificial Sequence; identical to SEQ ID NO: 829
  VL-89 Peptide Sequence

SEQ ID NO: 833 - protein, 107 aa, Artificial Sequence; identical to SEQ ID NO: 830
  VL-90 Peptide Sequence

SEQ ID NO: 834 - protein, 107 aa, Artificial Sequence; identical to SEQ ID NO: 829
  VL-91 Peptide Sequence

SEQ ID NO: 835 - protein, 107 aa, Artificial Sequence; identical to SEQ ID NO: 830
  VL-92 Peptide Sequence

SEQ ID NO: 836 - protein, 446 aa, Artificial Sequence
  2D10-hVH4-HVL1 heavy chain peptide sequence
QVQLVQSGAEVKKPGASVKVSCKASGYTFTDYYINWVRQAPGQRLEWMGWIYPGSQDTKYNEKFQGRVTLTVDTSASTAYMELSSLRSEDTAVYFCANYFGSSGWFFDVWGQGTMVTVSSASTKGPSVFPLAPCSRSTSESTAALGCLVKDYFPEPVTVSWNSGALTSGVHTFPAVLQSSGLYSLSSVVTVPSSSLGTKTYTCNVDHKPSNTKVDKRVESKYGPPCPPCPAPEFLGGPSVFLFPPKPKDTLMISRTPEVTCVVVDVSQEDPEVQFNWYVDGVEVHNAKTKPREEQFNSTYRVVSVLTVLHQDWLNGKEYKCKVSNKGLPSSIEKTISKAKGQPREPQVYTLPPSQEEMTKNQVSLTCLVKGFYPSDIAVEWESNGQPENNYKTTPPVLDSDGSFFLYSRLTVDKSRWQEGNVFSCSVMHEALHNHYTQKSLSLSLG

SEQ ID NO: 837 - protein, 446 aa, Artificial Sequence; identical to SEQ ID NO: 836
  2D10-hVH4-HVL2 heavy chain peptide sequence

SEQ ID NO: 838 - protein, 446 aa, Artificial Sequence; identical to SEQ ID NO: 836
  2D10-hVH4-HVL3 heavy chain peptide sequence

SEQ ID NO: 839 - protein, 446 aa, Artificial Sequence; identical to SEQ ID NO: 836
  2D10-hVH4-HVL4 heavy chain peptide sequence

SEQ ID NO: 840 - protein, 446 aa, Artificial Sequence
  2D10-hVH3-HVL1 heavy chain peptide sequence
QVQLVQSGAEVKKPGASVKVSCKASGYTFTDYYINWVRQAPGQRLEWMGWIYPGSQDTKYSQKFQGRVTITVDTSASTAYMELSSLRSEDTAVYYCANYFGSSGWFFDVWGQGTMVTVSSASTKGPSVFPLAPCSRSTSESTAALGCLVKDYFPEPVTVSWNSGALTSGVHTFPAVLQSSGLYSLSSVVTVPSSSLGTKTYTCNVDHKPSNTKVDKRVESKYGPPCPPCPAPEFLGGPSVFLFPPKPKDTLMISRTPEVTCVVVDVSQEDPEVQFNWYVDGVEVHNAKTKPREEQFNSTYRVVSVLTVLHQDWLNGKEYKCKVSNKGLPSSIEKTISKAKGQPREPQVYTLPPSQEEMTKNQVSLTCLVKGFYPSDIAVEWESNGQPENNYKTTPPVLDSDGSFFLYSRLTVDKSRWQEGNVFSCSVMHEALHNHYTQKSLSLSLG

SEQ ID NO: 841 - protein, 446 aa, Artificial Sequence; identical to SEQ ID NO: 840
  2D10-hVH3-HVL2 heavy chain peptide sequence

SEQ ID NO: 842 - protein, 446 aa, Artificial Sequence; identical to SEQ ID NO: 840
  2D10-hVH3-HVL3 heavy chain peptide sequence

SEQ ID NO: 843 - protein, 446 aa, Artificial Sequence; identical to SEQ ID NO: 840
  2D10-hVH3-HVL4 heavy chain peptide sequence

SEQ ID NO: 844 - protein, 442 aa, Artificial Sequence
  20H5.A3-VH3VL1 heavy chain peptide sequence
QIQLVQSGSELKKPGASVKVSCKASGYAFTTYGMSWVRQAPGQGLEWMGWVNTYSGVPTYADDFTGRFVFSLETSVSTAYLQISSLKAEDTAVYFCARGPYAMDYWGQGTLVTVSSASTKGPSVFPLAPCSRSTSESTAALGCLVKDYFPEPVTVSWNSGALTSGVHTFPAVLQSSGLYSLSSVVTVPSSSLGTKTYTCNVDHKPSNTKVDKRVESKYGPPCPPCPAPEFLGGPSVFLFPPKPKDTLMISRTPEVTCVVVDVSQEDPEVQFNWYVDGVEVHNAKTKPREEQFNSTYRVVSVLTVLHQDWLNGKEYKCKVSNKGLPSSIEKTISKAKGQPREPQVYTLPPSQEEMTKNQVSLTCLVKGFYPSDIAVEWESNGQPENNYKTTPPVLDSDGSFFLYSRLTVDKSRWQEGNVFSCSVMHEALHNHYTQKSLSLSLG

SEQ ID NO: 845 - protein, 442 aa, Artificial Sequence; identical to SEQ ID NO: 844
  20H5.A3-VH3VL3 heavy chain peptide sequence

SEQ ID NO: 846 - protein, 442 aa, Artificial Sequence
  20H5.A3-VH4VL1 heavy chain peptide sequence
QIQLVQSGSELKKPGASVKVSCKASGYAFTTYGMSWVRQAPGQGLEWMGWVNTYSGVPTSADDFTGRFVFSLETSVSTAYLQISSLKAEDTAVYFCARGPYAMDYWGQGTLVTVSSASTKGPSVFPLAPCSRSTSESTAALGCLVKDYFPEPVTVSWNSGALTSGVHTFPAVLQSSGLYSLSSVVTVPSSSLGTKTYTCNVDHKPSNTKVDKRVESKYGPPCPPCPAPEFLGGPSVFLFPPKPKDTLMISRTPEVTCVVVDVSQEDPEVQFNWYVDGVEVHNAKTKPREEQFNSTYRVVSVLTVLHQDWLNGKEYKCKVSNKGLPSSIEKTISKAKGQPREPQVYTLPPSQEEMTKNQVSLTCLVKGFYPSDIAVEWESNGQPENNYKTTPPVLDSDGSFFLYSRLTVDKSRWQEGNVFSCSVMHEALHNHYTQKSLSLSLG

SEQ ID NO: 847 - protein, 442 aa, Artificial Sequence
  20H5.A3-VH5VL1 heavy chain peptide sequence
QVQLVQSGFELKKPGASVKISCKASGYAFTTYGMSWVRQAPGQGLEWMGWVNTYSGVPTYAQAFTGRFVFSLDTSVSTAYLQISSLKAEDTAVYYCARGPYAMDYWGQGTLVTVSSASTKGPSVFPLAPCSRSTSESTAALGCLVKDYFPEPVTVSWNSGALTSGVHTFPAVLQSSGLYSLSSVVTVPSSSLGTKTYTCNVDHKPSNTKVDKRVESKYGPPCPPCPAPEFLGGPSVFLFPPKPKDTLMISRTPEVTCVVVDVSQEDPEVQFNWYVDGVEVHNAKTKPREEQFNSTYRVVSVLTVLHQDWLNGKEYKCKVSNKGLPSSIEKTISKAKGQPREPQVYTLPPSQEEMTKNQVSLTCLVKGFYPSDIAVEWESNGQPENNYKTTPPVLDSDGSFFLYSRLTVDKSRWQEGNVFSCSVMHEALHNHYTQKSLSLSLG

SEQ ID NO: 848 - protein, 442 aa, Artificial Sequence; identical to SEQ ID NO: 847
  20H5.A3-VH5VL3 heavy chain peptide sequence

SEQ ID NO: 849 - protein, 442 aa, Artificial Sequence
  20H5.A3-VH6VL1 heavy chain peptide sequence
QVQLVQSGFELKKPGASVKISCKASGYAFTTYGMSWVRQAPGQGLEWMGWVNTYSGVPTSAQAFTGRFVFSLDTSVSTAYLQISSLKAEDTAVYYCARGPYAMDYWGQGTLVTVSSASTKGPSVFPLAPCSRSTSESTAALGCLVKDYFPEPVTVSWNSGALTSGVHTFPAVLQSSGLYSLSSVVTVPSSSLGTKTYTCNVDHKPSNTKVDKRVESKYGPPCPPCPAPEFLGGPSVFLFPPKPKDTLMISRTPEVTCVVVDVSQEDPEVQFNWYVDGVEVHNAKTKPREEQFNSTYRVVSVLTVLHQDWLNGKEYKCKVSNKGLPSSIEKTISKAKGQPREPQVYTLPPSQEEMTKNQVSLTCLVKGFYPSDIAVEWESNGQPENNYKTTPPVLDSDGSFFLYSRLTVDKSRWQEGNVFSCSVMHEALHNHYTQKSLSLSLG

SEQ ID NO: 850 - protein, 442 aa, Artificial Sequence; identical to SEQ ID NO: 849
  20H5.A3-VH6VL3 heavy chain peptide sequence

SEQ ID NO: 851 - protein, 219 aa, Artificial Sequence
  2D10-hVH4-HVL1 light chain peptide sequence
DIVMTQSPLSLPVTPGEPASISCRSSKSLLHSDGITYLYWYLQKPGQSPQLLIYRMSNRASGVPDRFSGSGSGTDFTLKISRVEAEDVGVYYCAQMIEFPLTFGQGTKLEIKRTVAAPSVFIFPPSDEQLKSGTASVVCLLNNFYPREAKVQWKVDNALQSGNSQESVTEQDSKDSTYSLSSTLTLSKADYEKHKVYACEVTHQGLSSPVTKSFNRGEC

SEQ ID NO: 852 - protein, 219 aa, Artificial Sequence
  2D10-hVH4-HVL2 light chain peptide sequence
DIVMTQSPLSLPVTPGEPASISCRSSKSLLHSDGITYLYWYLQKPGQSPQLLIYRMSNLASGVPDRFSGSGSGTDFTLKISRVEAEDVGVYYCAQMIEFPLTFGQGTKLEIKRTVAAPSVFIFPPSDEQLKSGTASVVCLLNNFYPREAKVQWKVDNALQSGNSQESVTEQDSKDSTYSLSSTLTLSKADYEKHKVYACEVTHQGLSSPVTKSFNRGEC

SEQ ID NO: 853 - protein, 219 aa, Artificial Sequence
  2D10-hVH4-HVL3 light chain peptide sequence
DVVMTQSPLSLPVTLGQPASISCRSSKSLLHSDGITYLYWYQQRPGQSPRLLIYRMSNRDSGVPDRFSGSGSGTDFTLKISRVEAEDVGVYYCAQMIEFPLTFGQGTKLEIKRTVAAPSVFIFPPSDEQLKSGTASVVCLLNNFYPREAKVQWKVDNALQSGNSQESVTEQDSKDSTYSLSSTLTLSKADYEKHKVYACEVTHQGLSSPVTKSFNRGEC

SEQ ID NO: 854 - protein, 219 aa, Artificial Sequence
  2D10-hVH4-HVL4 light chain peptide sequence
DIVMTQSPLSLPVTLGQPASISCRSSKSLLHSDGITYLYWYQQRPGQSPQLLIYRMSNLDSGVPDRFSGSGSGTDFTLKISRVEAEDVGVYYCAQMIEFPLTFGQGTKLEIKRTVAAPSVFIFPPSDEQLKSGTASVVCLLNNFYPREAKVQWKVDNALQSGNSQESVTEQDSKDSTYSLSSTLTLSKADYEKHKVYACEVTHQGLSSPVTKSFNRGEC

SEQ ID NO: 855 - protein, 219 aa, Artificial Sequence; identical to SEQ ID NO: 851
  2D10-hVH3-HVL1 light chain peptide sequence

SEQ ID NO: 856 - protein, 219 aa, Artificial Sequence; identical to SEQ ID NO: 852
  2D10-hVH3-HVL2 light chain peptide sequence

SEQ ID NO: 857 - protein, 219 aa, Artificial Sequence; identical to SEQ ID NO: 853
  2D10-hVH3-HVL3 light chain peptide sequence

SEQ ID NO: 858 - protein, 219 aa, Artificial Sequence; identical to SEQ ID NO: 854
  2D10-hVH3-HVL4 light chain peptide sequence

SEQ ID NO: 859 - protein, 214 aa, Artificial Sequence
  20H5.A3-VH3VL1 light chain peptide sequence
DIQMTQSPSSLSASVGDRVTITCQASQDISNYLNWYQQKPGKAPKLLIYYTSSLLTGVPSRFSGSGSGTDYTFTISSLQPEDIATYYCQQYSKLPYTFGQGTKLEIKRTVAAPSVFIFPPSDEQLKSGTASVVCLLNNFYPREAKVQWKVDNALQSGNSQESVTEQDSKDSTYSLSSTLTLSKADYEKHKVYACEVTHQGLSSPVTKSFNRGEC

SEQ ID NO: 860 - protein, 214 aa, Artificial Sequence
  20H5.A3-VH3VL3 light chain peptide sequence
DIQMTQSPSSLSASVGDRVTITCRASQDISNYLNWYQQKPGKAPKLLIYYTSSLLSGVPSRFSGSGSGTDYTLTISSLQPEDFATYYCQQYSKLPYTFGQGTKLEIKRTVAAPSVFIFPPSDEQLKSGTASVVCLLNNFYPREAKVQWKVDNALQSGNSQESVTEQDSKDSTYSLSSTLTLSKADYEKHKVYACEVTHQGLSSPVTKSFNRGEC

SEQ ID NO: 861 - protein, 214 aa, Artificial Sequence; identical to SEQ ID NO: 859
  20H5.A3-VH4VL1 light chain peptide sequence

SEQ ID NO: 862 - protein, 214 aa, Artificial Sequence; identical to SEQ ID NO: 859
  20H5.A3-VH5VL1 light chain peptide sequence

SEQ ID NO: 863 - protein, 214 aa, Artificial Sequence; identical to SEQ ID NO: 860
  20H5.A3-VH5VL3 light chain peptide sequence

SEQ ID NO: 864 - protein, 214 aa, Artificial Sequence; identical to SEQ ID NO: 859
  20H5.A3-VH6VL1 light chain peptide sequence

SEQ ID NO: 865 - protein, 214 aa, Artificial Sequence; identical to SEQ ID NO: 860
  20H5.A3-VH6VL3 light chain peptide sequence

SEQ ID NO: 866 - DNA, 360 bp, Artificial Sequence
  2D10-hVH4-HVL1 VH DNA sequence
caggtacagttggttcaatctggggctgaggtgaaaaagccaggggcctccgttaaggtaagctgcaaggcaagcggctacacatttacagactattatatcaactgggtgaggcaagctcctggccagcggcttgagtggatggggtggatctatccggggagtcaagacaccaaatataatgagaagttccagggacgggtgacccttacagtagacacgtctgcaagcactgcctacatggagttgtcatccctccgctctgaagatactgccgtctacttttgcgctaattacttcggaagcagcgggtggttcttcgacgtttggggccagggaactatggtcacagtgtcatca

SEQ ID NO: 867 - DNA, 360 bp, Artificial Sequence; identical to SEQ ID NO: 866
  2D10-hVH4-HVL2 VH DNA sequence

SEQ ID NO: 868 - DNA, 360 bp, Artificial Sequence; identical to SEQ ID NO: 866
  2D10-hVH4-HVL3 VH DNA sequence

SEQ ID NO: 869 - DNA, 360 bp, Artificial Sequence; identical to SEQ ID NO: 866
  2D10-hVH4-HVL4 VH DNA sequence

SEQ ID NO: 870 - DNA, 360 bp, Artificial Sequence
  2D10-hVH3-HVL1 VH DNA sequence
caagtccagctggttcagtctggtgcggaggtcaagaagccaggggcaagcgtgaaagtctcctgtaaggcaagtggatatactttcacggattactatattaactgggtcagacaggcaccaggtcaacgcctcgaatggatgggctggatatacccaggtagccaagataccaagtactcccagaaatttcagggcagggtgaccattactgtggatacttccgcttctaccgcctacatggaactcagtagcctgcgttcagaggacaccgccgtgtactattgcgctaactatttcggatcctccggatggttcttcgatgtgtggggccaggggacgatggtgacagttagctcc

SEQ ID NO: 871 - DNA, 360 bp, Artificial Sequence; identical to SEQ ID NO: 870
  2D10-hVH3-HVL2 VH DNA sequence

SEQ ID NO: 872 - DNA, 360 bp, Artificial Sequence; identical to SEQ ID NO: 870
  2D10-hVH3-HVL3 VH DNA sequence

SEQ ID NO: 873 - DNA, 360 bp, Artificial Sequence; identical to SEQ ID NO: 870
  2D10-hVH3-HVL4 VH DNA sequence

SEQ ID NO: 874 - DNA, 348 bp, Artificial Sequence
  20H5.A3-VH3VL1 VH DNA sequence
caaatccagcttgttcagagtggatcagaactcaagaagcccggagcatccgtgaaagtgtcatgcaaggccagtggctacgcttttactacatatgggatgtcttgggttcggcaggcccccggccagggactagagtggatgggctgggttaacacctatagcggagtgcctacgtacgccgatgattttacaggcaggttcgtattttctctcgaaacgtccgtcagtaccgcctacctccaaattagctctctgaaagcagaggacaccgcagtctacttttgcgccagaggtccgtatgctatggattattggggacagggcaccctggtgacagtatcctcc

SEQ ID NO: 875 - DNA, 348 bp, Artificial Sequence; identical to SEQ ID NO: 874
  20H5.A3-VH3VL3 VH DNA sequence

SEQ ID NO: 876 - DNA, 348 bp, Artificial Sequence
  20H5.A3-VH4VL1 VH DNA sequence
caaatccagttggtgcagagtggttctgagctgaagaaacctggtgcttcagttaaggtctcttgcaaagcatccggttatgcatttactacctacggaatgtcttgggtaaggcaagctcccggacagggtctcgagtggatggggtgggtgaacacctattccggcgtgcctacgtcagccgacgactttactgggcgttttgtatttagtctagagacgtctgtttcaaccgcctacctgcagatctctagcctgaaagctgaagatacagccgtatatttctgtgcccggggaccatacgccatggactactggggccaagggactctggtgaccgtttctagc

SEQ ID NO: 877 - DNA, 348 bp, Artificial Sequence
  20H5.A3-VH5VL1 VH DNA sequence
caagtgcaactggtgcagagcggctttgagctgaaaaagcccggcgcctctgtgaagatcagttgcaaagcttccggctacgcctttaccacctatggtatgtcttgggttagacaggctccaggacagggcctggagtggatgggttgggtcaatacctactctggagtgccaacctatgctcaggcattcacaggccggtttgtcttcagtctcgataccagcgtgtcaaccgcatacctgcagatcagctctcttaaagccgaggataccgctgtctactactgtgccagaggaccttatgccatggattactgggggcaaggcaccctcgtcacagtgtcttct

SEQ ID NO: 878 - DNA, 348 bp, Artificial Sequence; identical to SEQ ID NO: 877
  20H5.A3-VH5VL3 VH DNA sequence

SEQ ID NO: 879 - DNA, 348 bp, Artificial Sequence
  20H5.A3-VH6VL1 VH DNA sequence
caggttcagcttgtccaatcaggctttgagctgaagaagcctggagctagcgtcaagattagttgtaaggcctcaggctacgctttcaccacctacggaatgtcctgggtgcggcaagccccaggccagggcctggagtggatgggatgggtgaatacgtacagtggcgtccccactagcgcccaggcttttactggaagattcgtgttctctcttgatacctccgtatcaaccgcttacctgcagataagttcactcaaggctgaggataccgccgtgtattattgtgcccgagggccctacgctatggattactggggacagggcacactcgtaacagtgagctct

SEQ ID NO: 880 - DNA, 348 bp, Artificial Sequence; identical to SEQ ID NO: 879
  20H5.A3-VH6VL3 VH DNA sequence

SEQ ID NO: 881 - DNA, 336 bp, Artificial Sequence
  2D10-hVH4-HVL1 VL DNA sequence
gacatcgtgatgacccagtctcccttatccctgccagtgacaccaggagaaccagccagcatttcttgccggtctagcaaatctctgctccactctgacggaatcacgtatctgtactggtatctccaaaagcctgggcagtccccacagctgctcatttatcgaatgagtaaccgtgcatctggagtgcccgacagattttcaggctctggcagtgggactgactttacactgaagattagcagagtcgaggctgaggatgtgggggtgtattactgtgcccagatgatagaatttcccctgactttcggacaggggactaaacttgagatcaaa

SEQ ID NO: 882 - DNA, 336 bp, Artificial Sequence
  2D10-hVH4-HVL2 VL DNA sequence
gatatcgtgatgacccaaagcccactgtctttgcctgttacaccgggcgaaccagcttccatcagttgtcgctccagtaagtcacttctccacagtgacggcatcacatacctgtattggtacctccagaagccaggccaatccccccaactgttgatttatagaatgtccaatctggcatccggagtgcctgaccgcttctccggctctggatctgggacagactttactctgaagatcagcagagtggaggcggaagatgtgggggtctactattgcgctcaaatgatcgagttccctctgacttttggacagggaacgaagctcgaaattaag

SEQ ID NO: 883 - DNA, 336 bp, Artificial Sequence
  2D10-hVH4-HVL3 VL DNA sequence
gatgtggtgatgactcaaagcccacttagcctgccagttactcttggacagccagccagtatttcttgccggagttccaagagcctgttgcacagcgacgggatcacatatttatactggtaccaacagagacctgggcagtccccgcgcttgctgatctacaggatgtctaacagagactcaggggtccccgacagatttagtggctctggaagcgggacagatttcacactgaagatctcaagggtcgaagccgaggacgtgggcgtgtattactgtgcacagatgatagagttccctcttacattcggccaggggaccaaacttgaaatcaag

SEQ ID NO: 884 - DNA, 336 bp, Artificial Sequence
  2D10-hVH4-HVL4 VL DNA sequence
gacatagtgatgacccagagcccccttagccttcccgtgacactgggacagccggcgtctatttcttgtaggtcctctaaatctttgttgcacagtgatggaatcacatatctgtactggtaccagcagcggccaggacagagccctcagctgctgatatatcgaatgtcaaacctcgatagcggtgttcctgaccgcttttccggaagcggctccggcaccgactttaccttaaagatctctcgggttgaggccgaggacgtgggagtctactactgcgctcagatgatcgaatttcctctcacgttcggacaaggtacaaagttagagatcaag

SEQ ID NO: 885 - DNA, 336 bp, Artificial Sequence; identical to SEQ ID NO: 881
  2D10-hVH3-HVL1 VL DNA sequence

SEQ ID NO: 886 - DNA, 336 bp, Artificial Sequence; identical to SEQ ID NO: 882
  2D10-hVH3-HVL2 VL DNA sequence

SEQ ID NO: 887 - DNA, 336 bp, Artificial Sequence; identical to SEQ ID NO: 883
  2D10-hVH3-HVL3 VL DNA sequence

SEQ ID NO: 888 - DNA, 336 bp, Artificial Sequence; identical to SEQ ID NO: 884
  2D10-hVH3-HVL4 VL DNA sequence

SEQ ID NO: 889 - DNA, 321 bp, Artificial Sequence
  20H5.A3-VH3VL1 VL DNA sequence
gacatccagatgactcagtctccaagcagcctgtccgcttcagtcggggaccgagttacaatcacctgtcaggctagccaggacattagcaactatctgaactggtatcagcagaaacccggaaaggcccctaaacttctgatctactatacatcttcactgctgacgggtgtcccctcccggttctctggctccggctccggtaccgactatacctttactatctcatctctacagcccgaagacatcgcaacatattattgtcaacaatattctaagctgccctacactttcggccaaggaacaaagctggagattaag

SEQ ID NO: 890 - DNA, 321 bp, Artificial Sequence
  20H5.A3-VH3VL3 VL DNA sequence
gacattcagatgacccaatccccttcctccctaagcgccagcgtgggcgaccgcgtaaccatcacctgtcgagccagtcaggacatttcaaactacctgaactggtatcagcaaaaaccaggcaaagcacctaaactgctcatctactacacttccagtttgctttcaggtgtcccaagccgctttagtggatcaggttccggtaccgattacaccctgacgatctctagtctgcagccagaggacttcgctacgtactattgccagcaatatagcaagctgccctacaccttcggccagggcactaagctggaaatcaag

SEQ ID NO: 891 - DNA, 321 bp, Artificial Sequence; identical to SEQ ID NO: 889
  20H5.A3-VH4VL1 VL DNA sequence

SEQ ID NO: 892 - DNA, 321 bp, Artificial Sequence; identical to SEQ ID NO: 889
  20H5.A3-VH5VL1 VL DNA sequence

SEQ ID NO: 893 - DNA, 321 bp, Artificial Sequence; identical to SEQ ID NO: 890
  20H5.A3-VH5VL3 VL DNA sequence

SEQ ID NO: 894 - DNA, 321 bp, Artificial Sequence; identical to SEQ ID NO: 889
  20H5.A3-VH6VL1 VL DNA sequence

SEQ ID NO: 895 - DNA, 321 bp, Artificial Sequence; identical to SEQ ID NO: 890
  20H5.A3-VH6VL3 VL DNA sequence

SEQ ID NO: 896 - DNA, 1344 bp, Artificial Sequence
  2D10-hVH4-HVL1 heavy chain DNA sequence
caggtacagttggttcaatctggggctgaggtgaaaaagccaggggcctccgttaaggtaagctgcaaggcaagcggctacacatttacagactattatatcaactgggtgaggcaagctcctggccagcggcttgagtggatggggtggatctatccggggagtcaagacaccaaatataatgagaagttccagggacgggtgacccttacagtagacacgtctgcaagcactgcctacatggagttgtcatccctccgctctgaagatactgccgtctacttttgcgctaattacttcggaagcagcgggtggttcttcgacgtttggggccagggaactatggtcacagtgtcatcagctagcaccaagggccccagcgtgtttcctctcgctccctgcagccggagcacatccgagagcaccgctgctctgggctgtctcgtgaaggactacttccctgaacccgtcaccgtcagctggaatagcggcgccctgacatccggcgtccacacattccccgctgtcctgcagagcagcggcctgtacagcctgagctccgtggtcaccgtgcctagcagcagcctgggaacaaagacctacacctgcaacgtggaccataagccctccaacaccaaggtggacaagcgggtggaatccaagtatggacccccctgtcctccttgccctgctcctgaatttctcggaggcccctccgtcttcctgtttccccccaagcccaaggacaccctgatgatctcccggacacccgaagtcacctgcgtcgtggtggatgtcagccaggaagatcccgaggtgcagttcaactggtacgtggacggagtggaggtgcataacgccaaaaccaagcccagggaagagcagttcaacagcacctatcgggtcgtgtccgtgctcaccgtcctgcatcaggattggctcaacggcaaggagtacaagtgcaaggtgtccaacaagggcctgccctcctccatcgagaagaccatctccaaggctaagggccaacctcgggagccccaagtgtataccctccctcccagccaggaggagatgaccaagaatcaagtgagcctgacctgcctcgtgaagggattttacccctccgacatcgctgtggaatgggaaagcaatggccaacctgagaacaactacaagaccacaccccccgtgctggactccgatggctccttcttcctgtacagcaggctgaccgtggacaaatcccggtggcaagagggaaacgtgttcagctgctccgtgatgcacgaggctctccacaaccactacacccagaagagcctctccctgagcctcggctagtaa

SEQ ID NO: 897 - DNA, 1344 bp, Artificial Sequence; identical to SEQ ID NO: 896
  2D10-hVH4-HVL2 heavy chain DNA sequence

SEQ ID NO: 898 - DNA, 1344 bp, Artificial Sequence; identical to SEQ ID NO: 896
  2D10-hVH4-HVL3 heavy chain DNA sequence

SEQ ID NO: 899 - DNA, 1344 bp, Artificial Sequence; identical to SEQ ID NO: 896
  2D10-hVH4-HVL4 heavy chain DNA sequence

SEQ ID NO: 900 - DNA, 1344 bp, Artificial Sequence
  2D10-hVH3-HVL1 heavy chain DNA sequence
caagtccagctggttcagtctggtgcggaggtcaagaagccaggggcaagcgtgaaagtctcctgtaaggcaagtggatatactttcacggattactatattaactgggtcagacaggcaccaggtcaacgcctcgaatggatgggctggatatacccaggtagccaagataccaagtactcccagaaatttcagggcagggtgaccattactgtggatacttccgcttctaccgcctacatggaactcagtagcctgcgttcagaggacaccgccgtgtactattgcgctaactatttcggatcctccggatggttcttcgatgtgtggggccaggggacgatggtgacagttagctccgctagcaccaagggccccagcgtgtttcctctcgctccctgcagccggagcacatccgagagcaccgctgctctgggctgtctcgtgaaggactacttccctgaacccgtcaccgtcagctggaatagcggcgccctgacatccggcgtccacacattccccgctgtcctgcagagcagcggcctgtacagcctgagctccgtggtcaccgtgcctagcagcagcctgggaacaaagacctacacctgcaacgtggaccataagccctccaacaccaaggtggacaagcgggtggaatccaagtatggacccccctgtcctccttgccctgctcctgaatttctcggaggcccctccgtcttcctgtttccccccaagcccaaggacaccctgatgatctcccggacacccgaagtcacctgcgtcgtggtggatgtcagccaggaagatcccgaggtgcagttcaactggtacgtggacggagtggaggtgcataacgccaaaaccaagcccagggaagagcagttcaacagcacctatcgggtcgtgtccgtgctcaccgtcctgcatcaggattggctcaacggcaaggagtacaagtgcaaggtgtccaacaagggcctgccctcctccatcgagaagaccatctccaaggctaagggccaacctcgggagccccaagtgtataccctccctcccagccaggaggagatgaccaagaatcaagtgagcctgacctgcctcgtgaagggattttacccctccgacatcgctgtggaatgggaaagcaatggccaacctgagaacaactacaagaccacaccccccgtgctggactccgatggctccttcttcctgtacagcaggctgaccgtggacaaatcccggtggcaagagggaaacgtgttcagctgctccgtgatgcacgaggctctccacaaccactacacccagaagagcctctccctgagcctcggctagtaa

SEQ ID NO: 901 - DNA, 1344 bp, Artificial Sequence; identical to SEQ ID NO: 900
  2D10-hVH3-HVL2 heavy chain DNA sequence

SEQ ID NO: 902 - DNA, 1344 bp, Artificial Sequence; identical to SEQ ID NO: 900
  2D10-hVH3-HVL3 heavy chain DNA sequence

SEQ ID NO: 903 - DNA, 1344 bp, Artificial Sequence; identical to SEQ ID NO: 900
  2D10-hVH3-HVL4 heavy chain DNA sequence

SEQ ID NO: 904 - DNA, 1332 bp, Artificial Sequence
  20H5.A3-VH3VL1 heavy chain DNA sequence
caaatccagcttgttcagagtggatcagaactcaagaagcccggagcatccgtgaaagtgtcatgcaaggccagtggctacgcttttactacatatgggatgtcttgggttcggcaggcccccggccagggactagagtggatgggctgggttaacacctatagcggagtgcctacgtacgccgatgattttacaggcaggttcgtattttctctcgaaacgtccgtcagtaccgcctacctccaaattagctctctgaaagcagaggacaccgcagtctacttttgcgccagaggtccgtatgctatggattattggggacagggcaccctggtgacagtatcctccgctagcaccaagggccccagcgtgtttcctctcgctccctgcagccggagcacatccgagagcaccgctgctctgggctgtctcgtgaaggactacttccctgaacccgtcaccgtcagctggaatagcggcgccctgacatccggcgtccacacattccccgctgtcctgcagagcagcggcctgtacagcctgagctccgtggtcaccgtgcctagcagcagcctgggaacaaagacctacacctgcaacgtggaccataagccctccaacaccaaggtggacaagcgggtggaatccaagtatggacccccctgtcctccttgccctgctcctgaatttctcggaggcccctccgtcttcctgtttccccccaagcccaaggacaccctgatgatctcccggacacccgaagtcacctgcgtcgtggtggatgtcagccaggaagatcccgaggtgcagttcaactggtacgtggacggagtggaggtgcataacgccaaaaccaagcccagggaagagcagttcaacagcacctatcgggtcgtgtccgtgctcaccgtcctgcatcaggattggctcaacggcaaggagtacaagtgcaaggtgtccaacaagggcctgccctcctccatcgagaagaccatctccaaggctaagggccaacctcgggagccccaagtgtataccctccctcccagccaggaggagatgaccaagaatcaagtgagcctgacctgcctcgtgaagggattttacccctccgacatcgctgtggaatgggaaagcaatggccaacctgagaacaactacaagaccacaccccccgtgctggactccgatggctccttcttcctgtacagcaggctgaccgtggacaaatcccggtggcaagagggaaacgtgttcagctgctccgtgatgcacgaggctctccacaaccactacacccagaagagcctctccctgagcctcggctagtaa

SEQ ID NO: 905 - DNA, 1332 bp, Artificial Sequence; identical to SEQ ID NO: 904
  20H5.A3-VH3VL3 heavy chain DNA sequence

SEQ ID NO: 906 - DNA, 1331 bp, Artificial Sequence
  20H5.A3-VH4VL1 heavy chain DNA sequence
caaatccagttggtgcagagtggttctgagctgaagaaacctggtgcttcagttaaggtctcttgcaaagcatccggttatgcatttactacctacggaatgtcttgggtaaggcaagctcccggacagggtctcgagtggatggggtgggtgaacacctattccggcgtgcctacgtcagccgacgactttactgggcgttttgtatttagtctagagacgtctgtttcaaccgcctacctgcagatctctagcctgaaagctgaagatacagccgtatatttctgtgcccggggaccatacgccatggactactggggccaagggactctggtgaccgtttctagcgctagcaccaagggccccagcgtgtttcctctcgctccctgcagccggagcacatccgagagcaccgctgctctgggctgtctcgtgaaggactacttccctgaacccgtcaccgtcagctggaatagcggcgccctgacatccggcgtccacacattccccgctgtcctgcagagcagcggcctgtacagcctgagctccgtggtcaccgtgcctagcagcagcctgggaacaaagacctacacctgcaacgtggaccataagccctccaacaccaaggtggacaagcgggtggaatccaagtatggacccccctgtcctccttgccctgctcctgaatttctcggaggcccctccgtcttcctgtttccccccaagcccaaggacaccctgatgatctcccggacacccgaagtcacctgcgtcgtggtggatgtcagccaggaagatcccgaggtgcagttcaactggtacgtggacggagtggaggtgcataacgccaaaaccaagcccagggaagagcagttcaacagcacctatcgggtcgtgtccgtgctcaccgtcctgcatcaggattggctcaacggcaaggagtacaagtgcaaggtgtccaacaagggcctgccctcctccatcgagaagaccatctccaaggctaagggccaacctcgggagccccaagtgtataccctccctcccagccaggaggagatgaccaagaatcaagtgagcctgacctgcctcgtgaagggattttacccctccgacatcgctgtggaatgggaaagcaatggccaacctgagaacaactacaagaccacaccccccgtgctggactccgatggctccttcttcctgtacagcaggctgaccgtggacaaatcccggtggcaagagggaaacgtgttcagctgctccgtgatgcacgaggctctccacaaccactacacccagaagagcctctccctgagcctcggctagta

SEQ ID NO: 907 - DNA, 1332 bp, Artificial Sequence
  20H5.A3-VH5VL1 heavy chain DNA sequence
caagtgcaactggtgcagagcggctttgagctgaaaaagcccggcgcctctgtgaagatcagttgcaaagcttccggctacgcctttaccacctatggtatgtcttgggttagacaggctccaggacagggcctggagtggatgggttgggtcaatacctactctggagtgccaacctatgctcaggcattcacaggccggtttgtcttcagtctcgataccagcgtgtcaaccgcatacctgcagatcagctctcttaaagccgaggataccgctgtctactactgtgccagaggaccttatgccatggattactgggggcaaggcaccctcgtcacagtgtcttctgctagcaccaagggccccagcgtgtttcctctcgctccctgcagccggagcacatccgagagcaccgctgctctgggctgtctcgtgaaggactacttccctgaacccgtcaccgtcagctggaatagcggcgccctgacatccggcgtccacacattccccgctgtcctgcagagcagcggcctgtacagcctgagctccgtggtcaccgtgcctagcagcagcctgggaacaaagacctacacctgcaacgtggaccataagccctccaacaccaaggtggacaagcgggtggaatccaagtatggacccccctgtcctccttgccctgctcctgaatttctcggaggcccctccgtcttcctgtttccccccaagcccaaggacaccctgatgatctcccggacacccgaagtcacctgcgtcgtggtggatgtcagccaggaagatcccgaggtgcagttcaactggtacgtggacggagtggaggtgcataacgccaaaaccaagcccagggaagagcagttcaacagcacctatcgggtcgtgtccgtgctcaccgtcctgcatcaggattggctcaacggcaaggagtacaagtgcaaggtgtccaacaagggcctgccctcctccatcgagaagaccatctccaaggctaagggccaacctcgggagccccaagtgtataccctccctcccagccaggaggagatgaccaagaatcaagtgagcctgacctgcctcgtgaagggattttacccctccgacatcgctgtggaatgggaaagcaatggccaacctgagaacaactacaagaccacaccccccgtgctggactccgatggctccttcttcctgtacagcaggctgaccgtggacaaatcccggtggcaagagggaaacgtgttcagctgctccgtgatgcacgaggctctccacaaccactacacccagaagagcctctccctgagcctcggctagtaa

SEQ ID NO: 908 - DNA, 1332 bp, Artificial Sequence; identical to SEQ ID NO: 907
  20H5.A3-VH5VL3 heavy chain DNA sequence

SEQ ID NO: 909 - DNA, 1332 bp, Artificial Sequence
  20H5.A3-VH6VL1 heavy chain DNA sequence
caggttcagcttgtccaatcaggctttgagctgaagaagcctggagctagcgtcaagattagttgtaaggcctcaggctacgctttcaccacctacggaatgtcctgggtgcggcaagccccaggccagggcctggagtggatgggatgggtgaatacgtacagtggcgtccccactagcgcccaggcttttactggaagattcgtgttctctcttgatacctccgtatcaaccgcttacctgcagataagttcactcaaggctgaggataccgccgtgtattattgtgcccgagggccctacgctatggattactggggacagggcacactcgtaacagtgagctctgctagcaccaagggccccagcgtgtttcctctcgctccctgcagccggagcacatccgagagcaccgctgctctgggctgtctcgtgaaggactacttccctgaacccgtcaccgtcagctggaatagcggcgccctgacatccggcgtccacacattccccgctgtcctgcagagcagcggcctgtacagcctgagctccgtggtcaccgtgcctagcagcagcctgggaacaaagacctacacctgcaacgtggaccataagccctccaacaccaaggtggacaagcgggtggaatccaagtatggacccccctgtcctccttgccctgctcctgaatttctcggaggcccctccgtcttcctgtttccccccaagcccaaggacaccctgatgatctcccggacacccgaagtcacctgcgtcgtggtggatgtcagccaggaagatcccgaggtgcagttcaactggtacgtggacggagtggaggtgcataacgccaaaaccaagcccagggaagagcagttcaacagcacctatcgggtcgtgtccgtgctcaccgtcctgcatcaggattggctcaacggcaaggagtacaagtgcaaggtgtccaacaagggcctgccctcctccatcgagaagaccatctccaaggctaagggccaacctcgggagccccaagtgtataccctccctcccagccaggaggagatgaccaagaatcaagtgagcctgacctgcctcgtgaagggattttacccctccgacatcgctgtggaatgggaaagcaatggccaacctgagaacaactacaagaccacaccccccgtgctggactccgatggctccttcttcctgtacagcaggctgaccgtggacaaatcccggtggcaagagggaaacgtgttcagctgctccgtgatgcacgaggctctccacaaccactacacccagaagagcctctccctgagcctcggctagtaa

SEQ ID NO: 910 - DNA, 1332 bp, Artificial Sequence; identical to SEQ ID NO: 909
  20H5.A3-VH6VL3 heavy chain DNA sequence

SEQ ID NO: 911 - DNA, 660 bp, Artificial Sequence
  2D10-hVH4-HVL1 light chain DNA sequence
gacatcgtgatgacccagtctcccttatccctgccagtgacaccaggagaaccagccagcatttcttgccggtctagcaaatctctgctccactctgacggaatcacgtatctgtactggtatctccaaaagcctgggcagtccccacagctgctcatttatcgaatgagtaaccgtgcatctggagtgcccgacagattttcaggctctggcagtgggactgactttacactgaagattagcagagtcgaggctgaggatgtgggggtgtattactgtgcccagatgatagaatttcccctgactttcggacaggggactaaacttgagatcaaaaggaccgtggccgcccccagcgtgttcatcttccctcccagcgacgagcagctgaagtctggcaccgccagcgtggtgtgcctgctgaacaacttctacccccgcgaggccaaggtgcagtggaaggtggacaacgccctgcagagcggcaacagccaggagagcgtgaccgagcaggactccaaggacagcacctacagcctgagcagcaccctgaccctgagcaaggccgactacgagaagcacaaggtgtacgcctgcgaggtgacccaccagggactgtctagccccgtgaccaagagcttcaaccggggcgagtgctaa

SEQ ID NO: 912 - DNA, 660 bp, Artificial Sequence
  2D10-hVH4-HVL2 light chain DNA sequence
gatatcgtgatgacccaaagcccactgtctttgcctgttacaccgggcgaaccagcttccatcagttgtcgctccagtaagtcacttctccacagtgacggcatcacatacctgtattggtacctccagaagccaggccaatccccccaactgttgatttatagaatgtccaatctggcatccggagtgcctgaccgcttctccggctctggatctgggacagactttactctgaagatcagcagagtggaggcggaagatgtgggggtctactattgcgctcaaatgatcgagttccctctgacttttggacagggaacgaagctcgaaattaagaggaccgtggccgcccccagcgtgttcatcttccctcccagcgacgagcagctgaagtctggcaccgccagcgtggtgtgcctgctgaacaacttctacccccgcgaggccaaggtgcagtggaaggtggacaacgccctgcagagcggcaacagccaggagagcgtgaccgagcaggactccaaggacagcacctacagcctgagcagcaccctgaccctgagcaaggccgactacgagaagcacaaggtgtacgcctgcgaggtgacccaccagggactgtctagccccgtgaccaagagcttcaaccggggcgagtgctaa

SEQ ID NO: 913 - DNA, 660 bp, Artificial Sequence
  2D10-hVH4-HVL3 light chain DNA sequence
gatgtggtgatgactcaaagcccacttagcctgccagttactcttggacagccagccagtatttcttgccggagttccaagagcctgttgcacagcgacgggatcacatatttatactggtaccaacagagacctgggcagtccccgcgcttgctgatctacaggatgtctaacagagactcaggggtccccgacagatttagtggctctggaagcgggacagatttcacactgaagatctcaagggtcgaagccgaggacgtgggcgtgtattactgtgcacagatgatagagttccctcttacattcggccaggggaccaaacttgaaatcaagaggaccgtggccgcccccagcgtgttcatcttccctcccagcgacgagcagctgaagtctggcaccgccagcgtggtgtgcctgctgaacaacttctacccccgcgaggccaaggtgcagtggaaggtggacaacgccctgcagagcggcaacagccaggagagcgtgaccgagcaggactccaaggacagcacctacagcctgagcagcaccctgaccctgagcaaggccgactacgagaagcacaaggtgtacgcctgcgaggtgacccaccagggactgtctagccccgtgaccaagagcttcaaccggggcgagtgctaa

SEQ ID NO: 914 - DNA, 660 bp, Artificial Sequence
  2D10-hVH4-HVL4 light chain DNA sequence
gacatagtgatgacccagagcccccttagccttcccgtgacactgggacagccggcgtctatttcttgtaggtcctctaaatctttgttgcacagtgatggaatcacatatctgtactggtaccagcagcggccaggacagagccctcagctgctgatatatcgaatgtcaaacctcgatagcggtgttcctgaccgcttttccggaagcggctccggcaccgactttaccttaaagatctctcgggttgaggccgaggacgtgggagtctactactgcgctcagatgatcgaatttcctctcacgttcggacaaggtacaaagttagagatcaagaggaccgtggccgcccccagcgtgttcatcttccctcccagcgacgagcagctgaagtctggcaccgccagcgtggtgtgcctgctgaacaacttctacccccgcgaggccaaggtgcagtggaaggtggacaacgccctgcagagcggcaacagccaggagagcgtgaccgagcaggactccaaggacagcacctacagcctgagcagcaccctgaccctgagcaaggccgactacgagaagcacaaggtgtacgcctgcgaggtgacccaccagggactgtctagccccgtgaccaagagcttcaaccggggcgagtgctaa

SEQ ID NO: 915 - DNA, 660 bp, Artificial Sequence; identical to SEQ ID NO: 911
  2D10-hVH3-HVL1 light chain DNA sequence

SEQ ID NO: 916 - DNA, 660 bp, Artificial Sequence; identical to SEQ ID NO: 912
  2D10-hVH3-HVL2 light chain DNA sequence

SEQ ID NO: 917 - DNA, 660 bp, Artificial Sequence; identical to SEQ ID NO: 913
  2D10-hVH3-HVL3 light chain DNA sequence

SEQ ID NO: 918 - DNA, 660 bp, Artificial Sequence; identical to SEQ ID NO: 914
  2D10-hVH3-HVL4 light chain DNA sequence

SEQ ID NO: 919 - DNA, 645 bp, Artificial Sequence
  20H5.A3-VH3VL1 light chain DNA sequence
gacatccagatgactcagtctccaagcagcctgtccgcttcagtcggggaccgagttacaatcacctgtcaggctagccaggacattagcaactatctgaactggtatcagcagaaacccggaaaggcccctaaacttctgatctactatacatcttcactgctgacgggtgtcccctcccggttctctggctccggctccggtaccgactatacctttactatctcatctctacagcccgaagacatcgcaacatattattgtcaacaatattctaagctgccctacactttcggccaaggaacaaagctggagattaagaggaccgtggccgcccccagcgtgttcatcttccctcccagcgacgagcagctgaagtctggcaccgccagcgtggtgtgcctgctgaacaacttctacccccgcgaggccaaggtgcagtggaaggtggacaacgccctgcagagcggcaacagccaggagagcgtgaccgagcaggactccaaggacagcacctacagcctgagcagcaccctgaccctgagcaaggccgactacgagaagcacaaggtgtacgcctgcgaggtgacccaccagggactgtctagccccgtgaccaagagcttcaaccggggcgagtgctaa

SEQ ID NO: 920 - DNA, 645 bp, Artificial Sequence
  20H5.A3-VH3VL3 light chain DNA sequence
gacattcagatgacccaatccccttcctccctaagcgccagcgtgggcgaccgcgtaaccatcacctgtcgagccagtcaggacatttcaaactacctgaactggtatcagcaaaaaccaggcaaagcacctaaactgctcatctactacacttccagtttgctttcaggtgtcccaagccgctttagtggatcaggttccggtaccgattacaccctgacgatctctagtctgcagccagaggacttcgctacgtactattgccagcaatatagcaagctgccctacaccttcggccagggcactaagctggaaatcaagaggaccgtggccgcccccagcgtgttcatcttccctcccagcgacgagcagctgaagtctggcaccgccagcgtggtgtgcctgctgaacaacttctacccccgcgaggccaaggtgcagtggaaggtggacaacgccctgcagagcggcaacagccaggagagcgtgaccgagcaggactccaaggacagcacctacagcctgagcagcaccctgaccctgagcaaggccgactacgagaagcacaaggtgtacgcctgcgaggtgacccaccagggactgtctagccccgtgaccaagagcttcaaccggggcgagtgctaa

SEQ ID NO: 921 - DNA, 645 bp, Artificial Sequence; identical to SEQ ID NO: 919
  20H5.A3-VH4VL1 light chain DNA sequence

SEQ ID NO: 922 - DNA, 645 bp, Artificial Sequence; identical to SEQ ID NO: 919
  20H5.A3-VH5VL1 light chain DNA sequence

SEQ ID NO: 923 - DNA, 645 bp, Artificial Sequence; identical to SEQ ID NO: 920
  20H5.A3-VH5VL3 light chain DNA sequence

SEQ ID NO: 924 - DNA, 645 bp, Artificial Sequence; identical to SEQ ID NO: 919
  20H5.A3-VH6VL1 light chain DNA sequence

SEQ ID NO: 925 - DNA, 645 bp, Artificial Sequence; identical to SEQ ID NO: 920
  20H5.A3-VH6VL3 light chain DNA sequence

SEQ ID NO: 926 - DNA, 21 bp, Artificial Sequence
  IFNg-2 forward primer
acagcaaggcgaaaaaggatg

SEQ ID NO: 927 - DNA, 19 bp, Artificial Sequence
  IFNg-2 reverse primer
tggtggaccactcggatga

SEQ ID NO: 928 - DNA, 23 bp, Artificial Sequence
  IL1beta forward primer
atgatggcttattacagtggcaa

SEQ ID NO: 929 - DNA, 20 bp, Artificial Sequence
  IL1beta reverse primer
gtcggacattcgtagctgga

SEQ ID NO: 930 - DNA, 23 bp, Artificial Sequence
  IL10-1 forward primer
cttactgactggcatgaggatca

SEQ ID NO: 931 - DNA, 20 bp, Artificial Sequence
  IL10-1 reverse primer
gcagctctaggagcatgtgg

SEQ ID NO: 932 - DNA, 20 bp, Artificial Sequence
  IL17a forward primer
tgagcttcccagatcacaga

SEQ ID NO: 933 - DNA, 20 bp, Artificial Sequence
  IL17a reverse primer
tccagaaggccctcagacta

SEQ ID NO: 934 - DNA, 20 bp, Artificial Sequence
  IL21 forward primer
cgcctcctgattagacttcg

SEQ ID NO: 935 - DNA, 21 bp, Artificial Sequence
  IL21 reverse primer
tgggtgtccttttctcatacg

SEQ ID NO: 936 - DNA, 20 bp, Artificial Sequence
  IL22 forward primer
tcgccttgatctctccactc

SEQ ID NO: 937 - DNA, 20 bp, Artificial Sequence
  IL22 reverse primer
gctcagctcctgtcacatca

SEQ ID NO: 938 - DNA, 20 bp, Artificial Sequence
  TGFbeta-2 forward primer
gagcccgaagcggactacta

SEQ ID NO: 939 - DNA, 23 bp, Artificial Sequence
  TGFbeta-2 reverse primer
tggttttctcatagatggcgttg

SEQ ID NO: 940 - protein, 112 aa, Artificial Sequence
  VH-78 Peptide Sequence
QVQLKQSGPELVKPGDSVKISCKAAGYTFSDYYINWVKQRPGQGLEWIGWIYPVSVNTKYNEKFKGKATLTVDTSSSTAYMQLSSLTSEDSGVYFCAYLDYWGQGTLVTVSA

SEQ ID NO: 941 - protein, 112 aa, Artificial Sequence
  VL-75 Peptide Sequence
DVVMTQTPLTLSVTIGQPASISCKSSQSLFHSDGKTYLNWLLQRPGQSPKRLIYLVSKLDSGVPDRFTGSGSGTDFTLKISRVEAEDLGVYYCWQGTHFPLTFGAGTKLEMK

SEQ ID NO: 942 - protein, 112 aa, Artificial Sequence
  VL-76 Peptide Sequence
DVVMTQTPLTLSVTIGQPASISCKSSQSLLHSDGKTYLNWLLQRPGQPPKRLMYLVSTLDSGVPDRFTGSGSGTDFTLKISRVEAEDLGVYYCWQGTHFPLTFGAGTKPELK

SEQ ID NO: 943 - protein, 112 aa, Artificial Sequence
  VL-77 Peptide Sequence
DIVMTQAAFSNPVTLGTSASISCRSSKSLLHSDGITYFYWYLQRPGQSPQLLIYRMSNLASGVPDRFSGSGSGTDFTLRISRVEAEDVGVYYCAQMLEFPLTFGAGTKLERA

SEQ ID NO: 944 - protein, 125 aa, Artificial Sequence
  Exemplary hIgG1, Ch2 constant heavy chain domain 2. Fc region
EPKSCDKTHTCPPCPAPELLGGPSVFLFPPKPKDTLMISRTPEVTCVVVDVSHEDPEVKFNWYVDGVEVHNAKTKPREEQYNSTYRVVSVLTVLHQDWLNGKEYKCKVSNKALPAPIEKTISKAK

SEQ ID NO: 945 - protein, 326 aa, Artificial Sequence
  Exemplary hIgG4 Fc region (S228P)
ASTKGPSVFPLAPCSRSTSESTAALGCLVKDYFPEPVTVSWNSGALTSGVHTFPAVLQSSGLYSLSSVVTVPSSSLGTKTYTCNVDHKPSNTKVDKRVESKYGPPCPPCPAPEFLGGPSVFLFPPKPKDTLMISRTPEVTCVVVDVSQEDPEVQFNWYVDGVEVHNAKTKPREEQFNSTYRVVSVLTVLHQDWLNGKEYKCKVSNKGLPSSIEKTISKAKGQPREPQVYTLPPSQEEMTKNQVSLTCLVKGFYPSDIAVEWESNGQPENNYKTTPPVLDSDGSFFLYSRLTVDKSRWQEGNVFSCSVMHEALHNHYTQKSLSLSLG

SEQ ID NO: 946 - protein, 107 aa, Artificial Sequence [sequence omitted]

SEQ ID NO: 947 - protein, 330 aa, Artificial Sequence
  Exemplary mIgG2A(LALAPG) Fc region
AKTTPPSVYPLAPVCGDTTGSSVTLGCLVKGYFPEPVTLTWNSGSLSSGVHTFPAVLQSDLYTLSSSVTVTSSTWPSQSITCNVAHPASSTKVDKKIEPRGPTIKPCPPCKCPAPNAAGGPSVFIFPPKIKDVLMISLSPIVTCVVVDVSEDDPDVQISWFVNNVEVHTAQTQTHREDYNSTLRVVSALPIQHQDWMSGKEFKCKVNNKDLGAPIERTISKPKGSVRAPQVYVLPPPEEEMTKKQVTLTCMVTDFMPEDIYVEWTNNGKTELNYKNTEPVLDSDGSYFMYSKLRVEKKNWVERNSYSCSVVHEGLHNHHTTKSFSRTPGK

SEQ ID NO: 948 - protein, 330 aa, Artificial Sequence
  Exemplary mIgG2A(LALA) Fc region
AKTTPPSVYPLAPVCGDTTGSSVTLGCLVKGYFPEPVTLTWNSGSLSSGVHTFPAVLQSDLYTLSSSVTVTSSTWPSQSITCNVAHPASSTKVDKKIEPRGPTIKPCPPCKCPAPNAAGGPSVFIFPPKIKDVLMISLSPIVTCVVVDVSEDDPDVQISWFVNNVEVHTAQTQTHREDYNSTLRVVSALPIQHQDWMSGKEFKCKVNNKDLPAPIERTISKPKGSVRAPQVYVLPPPEEEMTKKQVTLTCMVTDFMPEDIYVEWTNNGKTELNYKNTEPVLDSDGSYFMYSKLRVEKKNWVERNSYSCSVVHEGLHNHHTTKSFSRTPGK

SEQ ID NO: 949 - protein, 1382 aa, Homo sapiens
MATGGRRGAAAAPLLVAVAALLLGAAGHLYPGEVCPGMDIRNNLTRLHELENCSVIEGHLQILLMFKTRPEDFRDLSFPKLIMITDYLLLFRVYGLESLKDLFPNLTVIRGSRLFFNYALVIFEMVHLKELGLYNLMNITRGSVRIEKNNELCYLATIDWSRILDSVEDNYIVLNKDDNEECGDICPGTAKGKTNCPATVINGQFVERCWTHSHCQKVCPTICKSHGCTAEGLCCHSECLGNCSQPDDPTKCVACRNFYLDGRCVETCPPPYYHFQDWRCVNFSFCQDLHHKCKNSRRQGCHQYVIHNNKCIPECPSGYTMNSSNLLCTPCLGPCPKVCHLLEGEKTIDSVTSAQELRGCTVINGSLIINIRGGNNLAAELEANLGLIEEISGYLKIRRSYALVSLSFFRKLRLIRGETLEIGNYSFYALDNQNLRQLWDWSKHNLTITQGKLFFHYNPKLCLSEIHKMEEVSGTKGRQERNDIALKTNGDQASCENELLKFSYIRTSFDKILLRWEPYWPPDFRDLLGFMLFYKEAPYQNVTEFDGQDACGSNSWTVVDIDPPLRSNDPKSQNHPGWLMRGLKPWTQYAIFVKTLVTFSDERRTYGAKSDIIYVQTDATNPSVPLDPISVSNSSSQIILKWKPPSDPNGNITHYLVFWERQAEDSELFELDYCLKGLKLPSRTWSPPFESEDSQKHNQSEYEDSAGECCSCPKTDSQILKELEESSFRKTFEDYLHNVVFVPRKTSSGTGAEDPRPSRKRRSLGDVGNVTVAVPTVAAFPNTSSTSVPTSPEEHRPFEKVVNKESLVISGLRHFTGYRIELQACNQDTPEERCSVAAYVSARTMPEAKADDIVGPVTHEIFENNVVHLMWQEPKEPNGLIVLYEVSYRRYGDEELHLCVSRKHFALERGCRLRGLSPGNYSVRIRATSLAGNGSWTEPTYFYVTDYLDVPSNIAKIIIGPLIFVFLFSVVIGSIYLFLRKRQPDGPLGPLYASSNPEYLSASDVFPCSVYVPDEWEVSREKITLLRELGQGSFGMVYEGNARDIIKGEAETRVAVKTVNESASLRERIEFLNEASVMKGFTCHHVVRLLGVVSKGQPTLVVMELMAHGDLKSYLRSLRPEAENNPGRPPPTLQEMIQMAAEIADGMAYLNAKKFVHRDLAARNCMVAHDFTVKIGDFGMTRDIYETDYYRKGGKGLLPVRWMAPESLKDGVFTTSSDMWSFGVVLWEITSLAEQPYQGLSNEQVLKFVMDGGYLDQPDNCPERVTDLMRMCWQFNPKMRPTFLEIVNLLKDDLHPSFPEVSFFHSEENKAPESEELEMEFEDMENVPLDRSSHCQREEAGGRDGGSSLGFKRSYEEHIPYTHMNGGKKNGRILTLPRSNPS

SEQ ID NO: 950 - protein, 509 aa, Homo sapiens
MPSGFQQIGSEDGEPPQQRVTGTLVLAVFSAVLGSLQFGYNIGVINAPQKVIEQSYNETWLGRQGPEGPSSIPPGTLTTLWALSVAIFSVGGMISSFLIGIISQWLGRKRAMLVNNVLAVLGGSLMGLANAAASYEMLILGRFLIGAYSGLTSGLVPMYVGEIAPTHLRGALGTLNQLAIVIGILIAQVLGLESLLGTASLWPLLLGLTVLPALLQLVLLPFCPESPRYLYIIQNLEGPARKSLKRLTGWADVSGVLAELKDEKRKLERERPLSLLQLLGSRTHRQPLIIAVVLQLSQQLSGINAVFYYSTSIFETAGVGQPAYATIGAGVVNTVFTLVSVLLVERAGRRTLHLLGLAGMCGCAILMTVALLLLERVPAMSYVSIVAIFGFVAFFEIGPGPIPWFIVAELFSQGPRPAAMAVAGFSNWTSNFIIGMGFQYVAEAMGPYVFLLFAVLLLGFFIFTFLRVPETRGRTFDQISAAFHRTPSLLEQEVKPSTELEYLGPDEND

SEQ ID NO: 951 - protein, 8 aa, Artificial Sequence
  VH_CDR2_43
IYPGSNDA

SEQ ID NO: 952 - protein, 8 aa, Artificial Sequence
  VH_CDR2_44
IYPGSSDT

SEQ ID NO: 953 - protein, 13 aa, Artificial Sequence
  VH_CDR3_60
ANYFGASGWFFDV

SEQ ID NO: 954 - protein, 13 aa, Artificial Sequence
  VH_CDR3_61
ANYFGCSGWFFDV

SEQ ID NO: 955 - protein, 120 aa, Artificial Sequence
  VH-95 Peptide Sequence
QFQLQQSGPELVKPGASVKISCKASGYTFTDYYINWVKQRPGQGLEWIGWIYPGSQDTKYNEKFKGKATLTVDTSSSTAYMQLGSLTSEDSAVYFCANYFGASGWFFDVWGTGTTVTVSS

SEQ ID NO: 956 - protein, 120 aa, Artificial Sequence
  VH-96 Peptide Sequence
QFQLQQSGPELVKPGASVKISCKASGYTFTDYYINWVKQRPGQGLEWIGWIYPGSNDAKYNEKFKGKATLTVDTSSSTAYMQLGSLTSEDSAVYFCANYFGCSGWFFDVWGTGTTVTVSS

SEQ ID NO: 957 - protein, 120 aa, Artificial Sequence
  VH-97 Peptide Sequence
QFQLQQSGPELVKPGASVKISCKASGYTFTDYYINWVKQRPGQGLEWIGWIYPGSQDTKYNEKFKGKATLTVDTSSSTAYMQLGSLTSEDSAVYFCANYFGCSGWFFDVWGTGTTVTVSS

SEQ ID NO: 958 - protein, 120 aa, Artificial Sequence
  VH-98 Peptide Sequence
QFQLQQSGPELVKPGASVKISCKASGYTFTDYYINWVKQRPGQGLEWIGWIYPGSSDTKYNEKFKGKATLTVDTSSSTAYMQLGSLTSEDSAVYFCANYFGCSGWFFDVWGTGTTVTVSS

SEQ ID NO: 959 - protein, 120 aa, Artificial Sequence; identical to SEQ ID NO: 955
  VH-99 Peptide Sequence

SEQ ID NO: 960 - protein, 120 aa, Artificial Sequence
  VH-100 Peptide Sequence
QFQLQQSGPELVKPGASVKISCKASGYTFTDYYINWVKQRPGQGLEWIGWIYPGSQDTKYNEKFKGKATLTVDTSSSTAYMQLGSLTSEDSAVYFCANYFGSSGWFFDVWGTGTTVTVSS

SEQ ID NO: 961 - protein, 120 aa, Artificial Sequence
  VH-101 Peptide Sequence
QVQLVQSGAEVKKPGASVKVSCKASGYTFTDYYINWVRQAPGQGLEWMGWIYPGSQDTKYAQKFQGRVTMTVDTSISTAYMELSRLRSDDTAVYYCANYFGSSGWFFDVWGQGTMVTVSS

SEQ ID NO: 962 - protein, 120 aa, Artificial Sequence; identical to SEQ ID NO: 961
  VH-102 Peptide Sequence

SEQ ID NO: 963 - protein, 120 aa, Artificial Sequence; identical to SEQ ID NO: 961
  VH-103 Peptide Sequence

SEQ ID NO: 964 - protein, 120 aa, Artificial Sequence; identical to SEQ ID NO: 961
  VH-104 Peptide Sequence

SEQ ID NO: 965 - protein, 120 aa, Artificial Sequence
  VH-105 Peptide Sequence
QVQLVQSGAEVKKPGASVKVSCKASGYTFTDYYINWVRQAPGQGLEWMGWIYPGSQDTKYNEKFQGRVTLTVDTSISTAYMELSRLRSDDTAVYFCANYFGSSGWFFDVWGQGTMVTVSS

SEQ ID NO: 966 - protein, 120 aa, Artificial Sequence; identical to SEQ ID NO: 965
  VH-106 Peptide Sequence

SEQ ID NO: 967 - protein, 120 aa, Artificial Sequence; identical to SEQ ID NO: 965
  VH-107 Peptide Sequence

SEQ ID NO: 968 - protein, 120 aa, Artificial Sequence; identical to SEQ ID NO: 965
  VH-108 Peptide Sequence

SEQ ID NO: 969 - protein, 112 aa, Artificial Sequence; identical to SEQ ID NO: 383
  VL-93 Peptide Sequence

SEQ ID NO: 970 - protein, 112 aa, Artificial Sequence; identical to SEQ ID NO: 383
  VL-94 Peptide Sequence

SEQ ID NO: 971 - protein, 112 aa, Artificial Sequence; identical to SEQ ID NO: 383
  VL-95 Peptide Sequence

SEQ ID NO: 972 - protein, 112 aa, Artificial Sequence; identical to SEQ ID NO: 383
  VL-96 Peptide Sequence

SEQ ID NO: 973 - protein, 112 aa, Artificial Sequence; identical to SEQ ID NO: 383
  VL-97 Peptide Sequence

SEQ ID NO: 974 - protein, 112 aa, Artificial Sequence; identical to SEQ ID NO: 383
  VL-98 Peptide Sequence

SEQ ID NO: 975 - protein, 112 aa, Artificial Sequence; identical to SEQ ID NO: 821
  VL-99 Peptide Sequence

SEQ ID NO: 976 - protein, 112 aa, Artificial Sequence; identical to SEQ ID NO: 822
  VL-100 Peptide Sequence

SEQ ID NO: 977 - protein, 112 aa, Artificial Sequence; identical to SEQ ID NO: 823
  VL-101 Peptide Sequence

SEQ ID NO: 978 - protein, 112 aa, Artificial Sequence; identical to SEQ ID NO: 824
  VL-102 Peptide Sequence

SEQ ID NO: 979 - protein, 112 aa, Artificial Sequence; identical to SEQ ID NO: 821
  VL-103 Peptide Sequence

SEQ ID NO: 980 - protein, 112 aa, Artificial Sequence; identical to SEQ ID NO: 822
  VL-104 Peptide Sequence

SEQ ID NO: 981 - protein, 112 aa, Artificial Sequence; identical to SEQ ID NO: 823
  VL-105 Peptide Sequence

SEQ ID NO: 982 - protein, 112 aa, Artificial Sequence; identical to SEQ ID NO: 824
  VL-106 Peptide Sequence

SEQ ID NO: 983 - protein, 450 aa, Artificial Sequence
  2D10.2B2-v2 heavy chain peptide sequence
QFQLQQSGPELVKPGASVKISCKASGYTFTDYYINWVKQRPGQGLEWIGWIYPGSQDTKYNEKFKGKATLTVDTSSSTAYMQLGSLTSEDSAVYFCANYFGASGWFFDVWGTGTTVTVSSAKTTPPSVYPLAPVCGDTTGSSVTLGCLVKGYFPEPVTLTWNSGSLSSGVHTFPAVLQSDLYTLSSSVTVTSSTWPSQSITCNVAHPASSTKVDKKIEPRGPTIKPCPPCKCPAPNAAGGPSVFIFPPKIKDVLMISLSPIVTCVVVDVSEDDPDVQISWFVNNVEVHTAQTQTHREDYNSTLRVVSALPIQHQDWMSGKEFKCKVNNKDLGAPIERTISKPKGSVRAPQVYVLPPPEEEMTKKQVTLTCMVTDFMPEDIYVEWTNNGKTELNYKNTEPVLDSDGSYFMYSKLRVEKKNWVERNSYSCSVVHEGLHNHHTTKSFSRTPGK

SEQ ID NO: 984 - protein, 446 aa, Artificial Sequence
  2D10-VH0-NDA-VL0 heavy chain peptide sequence
QFQLQQSGPELVKPGASVKISCKASGYTFTDYYINWVKQRPGQGLEWIGWIYPGSNDAKYNEKFKGKATLTVDTSSSTAYMQLGSLTSEDSAVYFCANYFGCSGWFFDVWGTGTTVTVSSASTKGPSVFPLAPCSRSTSESTAALGCLVKDYFPEPVTVSWNSGALTSGVHTFPAVLQSSGLYSLSSVVTVPSSSLGTKTYTCNVDHKPSNTKVDKRVESKYGPPCPPCPAPEFLGGPSVFLFPPKPKDTLMISRTPEVTCVVVDVSQEDPEVQFNWYVDGVEVHNAKTKPREEQFNSTYRVVSVLTVLHQDWLNGKEYKCKVSNKGLPSSIEKTISKAKGQPREPQVYTLPPSQEEMTKNQVSLTCLVKGFYPSDIAVEWESNGQPENNYKTTPPVLDSDGSFFLYSRLTVDKSRWQEGNVFSCSVMHEALHNHYTQKSLSLSLG

SEQ ID NO: 985 - protein, 446 aa, Artificial Sequence
  2D10-VH0-QDT-VL0 heavy chain peptide sequence
QFQLQQSGPELVKPGASVKISCKASGYTFTDYYINWVKQRPGQGLEWIGWIYPGSQDTKYNEKFKGKATLTVDTSSSTAYMQLGSLTSEDSAVYFCANYFGCSGWFFDVWGTGTTVTVSSASTKGPSVFPLAPCSRSTSESTAALGCLVKDYFPEPVTVSWNSGALTSGVHTFPAVLQSSGLYSLSSVVTVPSSSLGTKTYTCNVDHKPSNTKVDKRVESKYGPPCPPCPAPEFLGGPSVFLFPPKPKDTLMISRTPEVTCVVVDVSQEDPEVQFNWYVDGVEVHNAKTKPREEQFNSTYRVVSVLTVLHQDWLNGKEYKCKVSNKGLPSSIEKTISKAKGQPREPQVYTLPPSQEEMTKNQVSLTCLVKGFYPSDIAVEWESNGQPENNYKTTPPVLDSDGSFFLYSRLTVDKSRWQEGNVFSCSVMHEALHNHYTQKSLSLSLG

SEQ ID NO: 986 - protein, 446 aa, Artificial Sequence
  2D10-VH0-SDT-VL0 heavy chain peptide sequence
QFQLQQSGPELVKPGASVKISCKASGYTFTDYYINWVKQRPGQGLEWIGWIYPGSSDTKYNEKFKGKATLTVDTSSSTAYMQLGSLTSEDSAVYFCANYFGCSGWFFDVWGTGTTVTVSSASTKGPSVFPLAPCSRSTSESTAALGCLVKDYFPEPVTVSWNSGALTSGVHTFPAVLQSSGLYSLSSVVTVPSSSLGTKTYTCNVDHKPSNTKVDKRVESKYGPPCPPCPAPEFLGGPSVFLFPPKPKDTLMISRTPEVTCVVVDVSQEDPEVQFNWYVDGVEVHNAKTKPREEQFNSTYRVVSVLTVLHQDWLNGKEYKCKVSNKGLPSSIEKTISKAKGQPREPQVYTLPPSQEEMTKNQVSLTCLVKGFYPSDIAVEWESNGQPENNYKTTPPVLDSDGSFFLYSRLTVDKSRWQEGNVFSCSVMHEALHNHYTQKSLSLSLG

SEQ ID NO: 987 - protein, 446 aa, Artificial Sequence
  2D10-VH0-v1-QDT heavy chain peptide sequence
QFQLQQSGPELVKPGASVKISCKASGYTFTDYYINWVKQRPGQGLEWIGWIYPGSQDTKYNEKFKGKATLTVDTSSSTAYMQLGSLTSEDSAVYFCANYFGASGWFFDVWGTGTTVTVSSASTKGPSVFPLAPCSRSTSESTAALGCLVKDYFPEPVTVSWNSGALTSGVHTFPAVLQSSGLYSLSSVVTVPSSSLGTKTYTCNVDHKPSNTKVDKRVESKYGPPCPPCPAPEFLGGPSVFLFPPKPKDTLMISRTPEVTCVVVDVSQEDPEVQFNWYVDGVEVHNAKTKPREEQFNSTYRVVSVLTVLHQDWLNGKEYKCKVSNKGLPSSIEKTISKAKGQPREPQVYTLPPSQEEMTKNQVSLTCLVKGFYPSDIAVEWESNGQPENNYKTTPPVLDSDGSFFLYSRLTVDKSRWQEGNVFSCSVMHEALHNHYTQKSLSLSLG

SEQ ID NO: 988 - protein, 446 aa, Artificial Sequence
  2D10-VH0-v2-QDT heavy chain peptide sequence
QFQLQQSGPELVKPGASVKISCKASGYTFTDYYINWVKQRPGQGLEWIGWIYPGSQDTKYNEKFKGKATLTVDTSSSTAYMQLGSLTSEDSAVYFCANYFGSSGWFFDVWGTGTTVTVSSASTKGPSVFPLAPCSRSTSESTAALGCLVKDYFPEPVTVSWNSGALTSGVHTFPAVLQSSGLYSLSSVVTVPSSSLGTKTYTCNVDHKPSNTKVDKRVESKYGPPCPPCPAPEFLGGPSVFLFPPKPKDTLMISRTPEVTCVVVDVSQEDPEVQFNWYVDGVEVHNAKTKPREEQFNSTYRVVSVLTVLHQDWLNGKEYKCKVSNKGLPSSIEKTISKAKGQPREPQVYTLPPSQEEMTKNQVSLTCLVKGFYPSDIAVEWESNGQPENNYKTTPPVLDSDGSFFLYSRLTVDKSRWQEGNVFSCSVMHEALHNHYTQKSLSLSLG

SEQ ID NO: 989 - protein, 446 aa, Artificial Sequence
  2D10-hVH1-hVL1 heavy chain peptide sequence
QVQLVQSGAEVKKPGASVKVSCKASGYTFTDYYINWVRQAPGQGLEWMGWIYPGSQDTKYAQKFQGRVTMTVDTSISTAYMELSRLRSDDTAVYYCANYFGSSGWFFDVWGQGTMVTVSSASTKGPSVFPLAPCSRSTSESTAALGCLVKDYFPEPVTVSWNSGALTSGVHTFPAVLQSSGLYSLSSVVTVPSSSLGTKTYTCNVDHKPSNTKVDKRVESKYGPPCPPCPAPEFLGGPSVFLFPPKPKDTLMISRTPEVTCVVVDVSQEDPEVQFNWYVDGVEVHNAKTKPREEQFNSTYRVVSVLTVLHQDWLNGKEYKCKVSNKGLPSSIEKTISKAKGQPREPQVYTLPPSQEEMTKNQVSLTCLVKGFYPSDIAVEWESNGQPENNYKTTPPVLDSDGSFFLYSRLTVDKSRWQEGNVFSCSVMHEALHNHYTQKSLSLSLG

SEQ ID NO: 990 - protein, 446 aa, Artificial Sequence; identical to SEQ ID NO: 989
  2D10-hVH1-hVL2 heavy chain peptide sequence

SEQ ID NO: 991 - protein, 446 aa, Artificial Sequence; identical to SEQ ID NO: 989
  2D10-hVH1-hVL3 heavy chain peptide sequence

SEQ ID NO: 992 - protein, 446 aa, Artificial Sequence; identical to SEQ ID NO: 989
  2D10-hVH1-hVL4 heavy chain peptide sequence

SEQ ID NO: 993 - protein, 446 aa, Artificial Sequence
  2D10-hVH2-hVL1 heavy chain peptide sequence
QVQLVQSGAEVKKPGASVKVSCKASGYTFTDYYINWVRQAPGQGLEWMGWIYPGSQDTKYNEKFQGRVTLTVDTSISTAYMELSRLRSDDTAVYFCANYFGSSGWFFDVWGQGTMVTVSSASTKGPSVFPLAPCSRSTSESTAALGCLVKDYFPEPVTVSWNSGALTSGVHTFPAVLQSSGLYSLSSVVTVPSSSLGTKTYTCNVDHKPSNTKVDKRVESKYGPPCPPCPAPEFLGGPSVFLFPPKPKDTLMISRTPEVTCVVVDVSQEDPEVQFNWYVDGVEVHNAKTKPREEQFNSTYRVVSVLTVLHQDWLNGKEYKCKVSNKGLPSSIEKTISKAKGQPREPQVYTLPPSQEEMTKNQVSLTCLVKGFYPSDIAVEWESNGQPENNYKTTPPVLDSDGSFFLYSRLTVDKSRWQEGNVFSCSVMHEALHNHYTQKSLSLSLG

SEQ ID NO: 994 - protein, 446 aa, Artificial Sequence; identical to SEQ ID NO: 993
  2D10-hVH2-hVL2 heavy chain peptide sequence

SEQ ID NO: 995 - protein, 446 aa, Artificial Sequence; identical to SEQ ID NO: 993
  2D10-hVH2-hVL3 heavy chain peptide sequence

SEQ ID NO: 996 - protein, 446 aa, Artificial Sequence; identical to SEQ ID NO: 993
  2D10-hVH2-hVL4 heavy chain peptide sequence

SEQ ID NO: 997 - protein, 219 aa, Artificial Sequence; identical to SEQ ID NO: 504
  2D10.2B2-v2 light chain peptide sequence

SEQ ID NO: 998 - protein, 219 aa, Artificial Sequence; identical to SEQ ID NO: 805
  2D10-VH0-NDA-VL0 light chain peptide sequence

SEQ ID NO: 999 - protein, 219 aa, Artificial Sequence; identical to SEQ ID NO: 805
  2D10-VH0-QDT-VL0 light chain peptide sequence

SEQ ID NO: 1000 - protein, 219 aa, Artificial Sequence; identical to SEQ ID NO: 805
  2D10-VH0-SDT-VL0 light chain peptide sequence

SEQ ID NO: 1001 - protein, 219 aa, Artificial Sequence; identical to SEQ ID NO: 805
  2D10-VH0-v1-QDT light chain peptide sequence

SEQ ID NO: 1002 - protein, 219 aa, Artificial Sequence; identical to SEQ ID NO: 805
  2D10-VH0-v2-QDT light chain peptide sequence

SEQ ID NO: 1003 - protein, 219 aa, Artificial Sequence; identical to SEQ ID NO: 851
  2D10-hVH1-hVL1 light chain peptide sequence

SEQ ID NO: 1004 - protein, 219 aa, Artificial Sequence; identical to SEQ ID NO: 852
  2D10-hVH1-hVL2 light chain peptide sequence

SEQ ID NO: 1005 - protein, 219 aa, Artificial Sequence; identical to SEQ ID NO: 853
  2D10-hVH1-hVL3 light chain peptide sequence

SEQ ID NO: 1006 - protein, 219 aa, Artificial Sequence; identical to SEQ ID NO: 854
  2D10-hVH1-hVL4 light chain peptide sequence

SEQ ID NO: 1007 - protein, 219 aa, Artificial Sequence; identical to SEQ ID NO: 851
  2D10-hVH2-hVL1 light chain peptide sequence

SEQ ID NO: 1008 - protein, 219 aa, Artificial Sequence; identical to SEQ ID NO: 852
  2D10-hVH2-hVL2 light chain peptide sequence

SEQ ID NO: 1009 - protein, 219 aa, Artificial Sequence; identical to SEQ ID NO: 853
  2D10-hVH2-hVL3 light chain peptide sequence

SEQ ID NO: 1010 - protein, 219 aa, Artificial Sequence; identical to SEQ ID NO: 854
  2D10-hVH2-hVL4 light chain peptide sequence

SEQ ID NO: 1011 - DNA, 360 bp, Artificial Sequence
  2D10.2B2-v2 VH DNA sequence
cagtttcagcttcaacagtctggtcctgaactcgtaaagcctggagccagtgtaaaaatatcctgtaaggcatcaggatacactttcaccgattactacatcaactgggtaaagcagcgacctggtcagggactggagtggattggctggatctaccccggatcacaagacaccaaatacaatgagaagttcaagggcaaagctacccttacagtcgatacctcctcctccaccgcatatatgcaacttgggtcactgacttcagaggattctgcagtctatttttgcgctaattactttggagccagcggctggtttttcgacgtgtggggaaccggaaccacagtgacagtatcctct

SEQ ID NO: 1012 - DNA, 360 bp, Artificial Sequence
  2D10-VH0-NDA-VL0 VH DNA sequence
cagtttcagcttcaacagtctggtcctgaactcgtaaagcctggagccagtgtaaaaatatcctgtaaggcatcaggatacactttcaccgattactacatcaactgggtaaagcagcgacctggtcagggactggagtggattggctggatctaccccggatcaaatgacgccaaatacaatgagaagttcaagggcaaagctacccttacagtcgatacctcctcctccaccgcatatatgcaacttgggtcactgacttcagaggattctgcagtctatttttgcgctaattactttggatgcagcggctggtttttcgacgtgtggggaaccggaaccacagtgacagtatcctct

SEQ ID NO: 1013 - DNA, 360 bp, Artificial Sequence
  2D10-VH0-QDT-VL0 VH DNA sequence
cagtttcagcttcaacagtctggtcctgaactcgtaaagcctggagccagtgtaaaaatatcctgtaaggcatcaggatacactttcaccgattactacatcaactgggtaaagcagcgacctggtcagggactggagtggattggctggatctaccccggatcacaagacaccaaatacaatgagaagttcaagggcaaagctacccttacagtcgatacctcctcctccaccgcatatatgcaacttgggtcactgacttcagaggattctgcagtctatttttgcgctaattactttggatgcagcggctggtttttcgacgtgtggggaaccggaaccacagtgacagtatcctct

SEQ ID NO: 1014 - DNA, 360 bp, Artificial Sequence
  2D10-VH0-SDT-VL0 VH DNA sequence
cagtttcagcttcaacagtctggtcctgaactcgtaaagcctggagccagtgtaaaaatatcctgtaaggcatcaggatacactttcaccgattactacatcaactgggtaaagcagcgacctggtcagggactggagtggattggctggatctaccccggatcatccgacaccaaatacaatgagaagttcaagggcaaagctacccttacagtcgatacctcctcctccaccgcatatatgcaacttgggtcactgacttcagaggattctgcagtctatttttgcgctaattactttggatgcagcggctggtttttcgacgtgtggggaaccggaaccacagtgacagtatcctct

SEQ ID NO: 1015 - DNA, 360 bp, Artificial Sequence; identical to SEQ ID NO: 1011
  2D10-VH0-v1-QDT VH DNA sequence

SEQ ID NO: 1016 - DNA, 360 bp, Artificial Sequence
  2D10-VH0-v2-QDT VH DNA sequence
cagtttcagcttcaacagtctggtcctgaactcgtaaagcctggagccagtgtaaaaatatcctgtaaggcatcaggatacactttcaccgattactacatcaactgggtaaagcagcgacctggtcagggactggagtggattggctggatctaccccggatcacaagacaccaaatacaatgagaagttcaagggcaaagctacccttacagtcgatacctcctcctccaccgcatatatgcaacttgggtcactgacttcagaggattctgcagtctatttttgcgctaattactttggatctagcggctggtttttcgacgtgtggggaaccggaaccacagtgacagtatcctct

SEQ ID NO: 1017 - DNA, 360 bp, Artificial Sequence
  2D10-hVH1-hVL1 VH DNA sequence
caggtacaactcgtgcagtcaggggctgaagtgaagaaacctggggctagtgttaaggtaagctgcaaggctagcggatacacattcacggattactatatcaattgggtgcggcaggctcctggacagggactcgaatggatgggttggatctaccctggatcccaggataccaagtatgcacagaaatttcagggccgcgtcacgatgacagttgacacatccatatcaacagcctacatggaactcagtagattgcggtctgacgacaccgccgtttactattgtgcgaactattttggatcaagcgggtggttctttgacgtttggggccagggtactatggtcacagtgagctct

SEQ ID NO: 1018 - DNA, 360 bp, Artificial Sequence; identical to SEQ ID NO: 1017
  2D10-hVH1-hVL2 VH DNA sequence

SEQ ID NO: 1019 - DNA, 360 bp, Artificial Sequence; identical to SEQ ID NO: 1017
  2D10-hVH1-hVL3 VH DNA sequence

SEQ ID NO: 1020 - DNA, 360 bp, Artificial Sequence; identical to SEQ ID NO: 1017
  2D10-hVH1-hVL4 VH DNA sequence

SEQ ID NO: 1021 - DNA, 360 bp, Artificial Sequence
  2D10-hVH2-hVL1 VH DNA sequence
caagtccagctggtccagtccggcgctgaagtgaaaaaacccggagcttcagttaaggtgagctgcaaggcttctggctatacattcactgattactatatcaattgggtacgtcaggcacctggccaaggcctcgagtggatggggtggatctatccagggtcccaggacacaaaatataatgaaaaatttcagggacgggtgaccctgacagtggacacctctattagcacggcctatatggagctgtccaggcttaggtctgatgacacagccgtctacttttgtgctaactatttcggctccagcggctggttctttgatgtctggggacaagggacaatggtgaccgtctcctca

SEQ ID NO: 1022 - DNA, 360 bp, Artificial Sequence; identical to SEQ ID NO: 1021
  2D10-hVH2-hVL2 VH DNA sequence

SEQ ID NO: 1023 - DNA, 360 bp, Artificial Sequence; identical to SEQ ID NO: 1021
  2D10-hVH2-hVL3 VH DNA sequence

SEQ ID NO: 1024 - DNA, 360 bp, Artificial Sequence; identical to SEQ ID NO: 1021
  2D10-hVH2-hVL4 VH DNA sequence

SEQ ID NO: 1025 - DNA, 336 bp, Artificial Sequence; identical to SEQ ID NO: 631
  2D10.2B2-v2 VL DNA sequence

SEQ ID NO: 1026 - DNA, 336 bp, Artificial Sequence; identical to SEQ ID NO: 631
  2D10-VH0-NDA-VL0 VL DNA sequence

SEQ ID NO: 1027 - DNA, 336 bp, Artificial Sequence; identical to SEQ ID NO: 631
  2D10-VH0-QDT-VL0 VL DNA sequence

SEQ ID NO: 1028 - DNA, 336 bp, Artificial Sequence; identical to SEQ ID NO: 631
  2D10-VH0-SDT-VL0 VL DNA sequence

SEQ ID NO: 1029 - DNA, 336 bp, Artificial Sequence; identical to SEQ ID NO: 631
  2D10-VH0-v1-QDT VL DNA sequence

SEQ ID NO: 1030 - DNA, 336 bp, Artificial Sequence; identical to SEQ ID NO: 631
  2D10-VH0-v2-QDT VL DNA sequence

SEQ ID NO: 1031 - DNA, 336 bp, Artificial Sequence; identical to SEQ ID NO: 881
  2D10-hVH1-hVL1 VL DNA sequence

SEQ ID NO: 1032 - DNA, 336 bp, Artificial Sequence; identical to SEQ ID NO: 882
  2D10-hVH1-hVL2 VL DNA sequence

SEQ ID NO: 1033 - DNA, 336 bp, Artificial Sequence; identical to SEQ ID NO: 883
  2D10-hVH1-hVL3 VL DNA sequence

SEQ ID NO: 1034 - DNA, 336 bp, Artificial Sequence; identical to SEQ ID NO: 884
  2D10-hVH1-hVL4 VL DNA sequence

SEQ ID NO: 1035 - DNA, 336 bp, Artificial Sequence; identical to SEQ ID NO: 881
  2D10-hVH2-hVL1 VL DNA sequence

SEQ ID NO: 1036 - DNA, 336 bp, Artificial Sequence; identical to SEQ ID NO: 882
  2D10-hVH2-hVL2 VL DNA sequence

SEQ ID NO: 1037 - DNA, 336 bp, Artificial Sequence; identical to SEQ ID NO: 883
  2D10-hVH2-hVL3 VL DNA sequence

SEQ ID NO: 1038 - DNA, 336 bp, Artificial Sequence; identical to SEQ ID NO: 884
  2D10-hVH2-hVL4 VL DNA sequence

SEQ ID NO: 1039 - DNA, 1356 bp, Artificial Sequence
  2D10.2B2-v2 heavy chain DNA sequence
cagtttcagcttcaacagtctggtcctgaactcgtaaagcctggagccagtgtaaaaatatcctgtaaggcatcaggatacactttcaccgattactacatcaactgggtaaagcagcgacctggtcagggactggagtggattggctggatctaccccggatcacaagacaccaaatacaatgagaagttcaagggcaaagctacccttacagtcgatacctcctcctccaccgcatatatgcaacttgggtcactgacttcagaggattctgcagtctatttttgcgctaattactttggagccagcggctggtttttcgacgtgtggggaaccggaaccacagtgacagtatcctctgctaagactactcctcccagtgtctaccccctggcccccgtgtgcggcgacacaacaggctcctccgtgacactgggctgcctggtgaaaggctacttccccgagcccgtgacactgacatggaactccggctccctgtcctccggcgtgcacacattccccgccgtgctgcagtccgacctgtacacactgtcctcctccgtgacagtgacatcctccacatggccctcccagtccatcacatgcaacgtggcccaccccgcctcctccacaaaagtggacaaaaaaatcgagcccaggggccccacaatcaaaccctgccccccctgcaaatgccccgcccccaacgccgccggcggcccctccgtgttcatcttcccccccaaaatcaaagacgtgctgatgatctccctgtcccccatcgtgacatgcgtggtggtggacgtgtccgaggacgaccccgacgtgcagatctcctggttcgtgaacaacgtggaggtgcacacagcccagacacagacacacagggaggactacaactccacactgagggtggtgtccgccctgcccatccagcaccaggactggatgtccggcaaagagttcaaatgcaaagtgaacaacaaagacctgggcgcccccatcgagaggacaatctccaaacccaaaggctccgtgagggccccccaggtgtacgtgctgcccccccccgaggaggagatgacaaaaaaacaggtgacactgacatgcatggtgacagacttcatgcccgaggacatctacgtggagtggacaaacaacggcaaaacagagctgaactacaaaaacacagagcccgtgctggactccgacggctcctacttcatgtactccaaactgagggtggagaaaaaaaactgggtggagaggaactcctactcctgctccgtggtgcacgagggcctgcacaaccaccacacaacaaaatccttctccaggacacccggcaaatagtaa

SEQ ID NO: 1040 - DNA, 1344 bp, Artificial Sequence
  2D10-VH0-NDA-VL0 heavy chain DNA sequence
cagtttcagcttcaacagtctggtcctgaactcgtaaagcctggagccagtgtaaaaatatcctgtaaggcatcaggatacactttcaccgattactacatcaactgggtaaagcagcgacctggtcagggactggagtggattggctggatctaccccggatcaaatgacgccaaatacaatgagaagttcaagggcaaagctacccttacagtcgatacctcctcctccaccgcatatatgcaacttgggtcactgacttcagaggattctgcagtctatttttgcgctaattactttggatgcagcggctggtttttcgacgtgtggggaaccggaaccacagtgacagtatcctctgctagcaccaagggccccagcgtgtttcctctcgctccctgcagccggagcacatccgagagcaccgctgctctgggctgtctcgtgaaggactacttccctgaacccgtcaccgtcagctggaatagcggcgccctgacatccggcgtccacacattccccgctgtcctgcagagcagcggcctgtacagcctgagctccgtggtcaccgtgcctagcagcagcctgggaacaaagacctacacctgcaacgtggaccataagccctccaacaccaaggtggacaagcgggtggaatccaagtatggacccccctgtcctccttgccctgctcctgaatttctcggaggcccctccgtcttcctgtttccccccaagcccaaggacaccctgatgatctcccggacacccgaagtcacctgcgtcgtggtggatgtcagccaggaagatcccgaggtgcagttcaactggtacgtggacggagtggaggtgcataacgccaaaaccaagcccagggaagagcagttcaacagcacctatcgggtcgtgtccgtgctcaccgtcctgcatcaggattggctcaacggcaaggagtacaagtgcaaggtgtccaacaagggcctgccctcctccatcgagaagaccatctccaaggctaagggccaacctcgggagccccaagtgtataccctccctcccagccaggaggagatgaccaagaatcaagtgagcctgacctgcctcgtgaagggattttacccctccgacatcgctgtggaatgggaaagcaatggccaacctgagaacaactacaagaccacaccccccgtgctggactccgatggctccttcttcctgtacagcaggctgaccgtggacaaatcccggtggcaagagggaaacgtgttcagctgctccgtgatgcacgaggctctccacaaccactacacccagaagagcctctccctgagcctcggctagtaa

SEQ ID NO: 1041 - DNA, 1344 bp, Artificial Sequence
  2D10-VH0-QDT-VL0 heavy chain DNA sequence
cagtttcagcttcaacagtctggtcctgaactcgtaaagcctggagccagtgtaaaaatatcctgtaaggcatcaggatacactttcaccgattactacatcaactgggtaaagcagcgacctggtcagggactggagtggattggctggatctaccccggatcacaagacaccaaatacaatgagaagttcaagggcaaagctacccttacagtcgatacctcctcctccaccgcatatatgcaacttgggtcactgacttcagaggattctgcagtctatttttgcgctaattactttggatgcagcggctggtttttcgacgtgtggggaaccggaaccacagtgacagtatcctctgctagcaccaagggccccagcgtgtttcctctcgctccctgcagccggagcacatccgagagcaccgctgctctgggctgtctcgtgaaggactacttccctgaacccgtcaccgtcagctggaatagcggcgccctgacatccggcgtccacacattccccgctgtcctgcagagcagcggcctgtacagcctgagctccgtggtcaccgtgcctagcagcagcctgggaacaaagacctacacctgcaacgtggaccataagccctccaacaccaaggtggacaagcgggtggaatccaagtatggacccccctgtcctccttgccctgctcctgaatttctcggaggcccctccgtcttcctgtttccccccaagcccaaggacaccctgatgatctcccggacacccgaagtcacctgcgtcgtggtggatgtcagccaggaagatcccgaggtgcagttcaactggtacgtggacggagtggaggtgcataacgccaaaaccaagcccagggaagagcagttcaacagcacctatcgggtcgtgtccgtgctcaccgtcctgcatcaggattggctcaacggcaaggagtacaagtgcaaggtgtccaacaagggcctgccctcctccatcgagaagaccatctccaaggctaagggccaacctcgggagccccaagtgtataccctccctcccagccaggaggagatgaccaagaatcaagtgagcctgacctgcctcgtgaagggattttacccctccgacatcgctgtggaatgggaaagcaatggccaacctgagaacaactacaagaccacaccccccgtgctggactccgatggctccttcttcctgtacagcaggctgaccgtggacaaatcccggtggcaagagggaaacgtgttcagctgctccgtgatgcacgaggctctccacaaccactacacccagaagagcctctccctgagcctcggctagtaa

SEQ ID NO: 1042 - DNA, 1344 bp, Artificial Sequence
  2D10-VH0-SDT-VL0 heavy chain DNA sequence
cagtttcagcttcaacagtctggtcctgaactcgtaaagcctggagccagtgtaaaaatatcctgtaaggcatcaggatacactttcaccgattactacatcaactgggtaaagcagcgacctggtcagggactggagtggattggctggatctaccccggatcatccgacaccaaatacaatgagaagttcaagggcaaagctacccttacagtcgatacctcctcctccaccgcatatatgcaacttgggtcactgacttcagaggattctgcagtctatttttgcgctaattactttggatgcagcggctggtttttcgacgtgtggggaaccggaaccacagtgacagtatcctctgctagcaccaagggccccagcgtgtttcctctcgctccctgcagccggagcacatccgagagcaccgctgctctgggctgtctcgtgaaggactacttccctgaacccgtcaccgtcagctggaatagcggcgccctgacatccggcgtccacacattccccgctgtcctgcagagcagcggcctgtacagcctgagctccgtggtcaccgtgcctagcagcagcctgggaacaaagacctacacctgcaacgtggaccataagccctccaacaccaaggtggacaagcgggtggaatccaagtatggacccccctgtcctccttgccctgctcctgaatttctcggaggcccctccgtcttcctgtttccccccaagcccaaggacaccctgatgatctcccggacacccgaagtcacctgcgtcgtggtggatgtcagccaggaagatcccgaggtgcagttcaactggtacgtggacggagtggaggtgcataacgccaaaaccaagcccagggaagagcagttcaacagcacctatcgggtcgtgtccgtgctcaccgtcctgcatcaggattggctcaacggcaaggagtacaagtgcaaggtgtccaacaagggcctgccctcctccatcgagaagaccatctccaaggctaagggccaacctcgggagccccaagtgtataccctccctcccagccaggaggagatgaccaagaatcaagtgagcctgacctgcctcgtgaagggattttacccctccgacatcgctgtggaatgggaaagcaatggccaacctgagaacaactacaagaccacaccccccgtgctggactccgatggctccttcttcctgtacagcaggctgaccgtggacaaatcccggtggcaagagggaaacgtgttcagctgctccgtgatgcacgaggctctccacaaccactacacccagaagagcctctccctgagcctcggctagtaa

SEQ ID NO: 1043 - DNA, 1344 bp, Artificial Sequence
  2D10-VH0-v1-QDT heavy chain DNA sequence
cagtttcagcttcaacagtctggtcctgaactcgtaaagcctggagccagtgtaaaaatatcctgtaaggcatcaggatacactttcaccgattactacatcaactgggtaaagcagcgacctggtcagggactggagtggattggctggatctaccccggatcacaagacaccaaatacaatgagaagttcaagggcaaagctacccttacagtcgatacctcctcctccaccgcatatatgcaacttgggtcactgacttcagaggattctgcagtctatttttgcgctaattactttggagccagcggctggtttttcgacgtgtggggaaccggaaccacagtgacagtatcctctgctagcaccaagggccccagcgtgtttcctctcgctccctgcagccggagcacatccgagagcaccgctgctctgggctgtctcgtgaaggactacttccctgaacccgtcaccgtcagctggaatagcggcgccctgacatccggcgtccacacattccccgctgtcctgcagagcagcggcctgtacagcctgagctccgtggtcaccgtgcctagcagcagcctgggaacaaagacctacacctgcaacgtggaccataagccctccaacaccaaggtggacaagcgggtggaatccaagtatggacccccctgtcctccttgccctgctcctgaatttctcggaggcccctccgtcttcctgtttccccccaagcccaaggacaccctgatgatctcccggacacccgaagtcacctgcgtcgtggtggatgtcagccaggaagatcccgaggtgcagttcaactggtacgtggacggagtggaggtgcataacgccaaaaccaagcccagggaagagcagttcaacagcacctatcgggtcgtgtccgtgctcaccgtcctgcatcaggattggctcaacggcaaggagtacaagtgcaaggtgtccaacaagggcctgccctcctccatcgagaagaccatctccaaggctaagggccaacctcgggagccccaagtgtataccctccctcccagccaggaggagatgaccaagaatcaagtgagcctgacctgcctcgtgaagggattttacccctccgacatcgctgtggaatgggaaagcaatggccaacctgagaacaactacaagaccacaccccccgtgctggactccgatggctccttcttcctgtacagcaggctgaccgtggacaaatcccggtggcaagagggaaacgtgttcagctgctccgtgatgcacgaggctctccacaaccactacacccagaagagcctctccctgagcctcggctagtaa

SEQ ID NO: 1044 - DNA, 1344 bp, Artificial Sequence
  2D10-VH0-v2-QDT heavy chain DNA sequence
cagtttcagcttcaacagtctggtcctgaactcgtaaagcctggagccagtgtaaaaatatcctgtaaggcatcaggatacactttcaccgattactacatcaactgggtaaagcagcgacctggtcagggactggagtggattggctggatctaccccggatcacaagacaccaaatacaatgagaagttcaagggcaaagctacccttacagtcgatacctcctcctccaccgcatatatgcaacttgggtcactgacttcagaggattctgcagtctatttttgcgctaattactttggatctagcggctggtttttcgacgtgtggggaaccggaaccacagtgacagtatcctctgctagcaccaagggccccagcgtgtttcctctcgctccctgcagccggagcacatccgagagcaccgctgctctgggctgtctcgtgaaggactacttccctgaacccgtcaccgtcagctggaatagcggcgccctgacatccggcgtccacacattccccgctgtcctgcagagcagcggcctgtacagcctgagctccgtggtcaccgtgcctagcagcagcctgggaacaaagacctacacctgcaacgtggaccataagccctccaacaccaaggtggacaagcgggtggaatccaagtatggacccccctgtcctccttgccctgctcctgaatttctcggaggcccctccgtcttcctgtttccccccaagcccaaggacaccctgatgatctcccggacacccgaagtcacctgcgtcgtggtggatgtcagccaggaagatcccgaggtgcagttcaactggtacgtggacggagtggaggtgcataacgccaaaaccaagcccagggaagagcagttcaacagcacctatcgggtcgtgtccgtgctcaccgtcctgcatcaggattggctcaacggcaaggagtacaagtgcaaggtgtccaacaagggcctgccctcctccatcgagaagaccatctccaaggctaagggccaacctcgggagccccaagtgtataccctccctcccagccaggaggagatgaccaagaatcaagtgagcctgacctgcctcgtgaagggattttacccctccgacatcgctgtggaatgggaaagcaatggccaacctgagaacaactacaagaccacaccccccgtgctggactccgatggctccttcttcctgtacagcaggctgaccgtggacaaatcccggtggcaagagggaaacgtgttcagctgctccgtgatgcacgaggctctccacaaccactacacccagaagagcctctccctgagcctcggctagtaa

SEQ ID NO: 1045 - DNA, 1344 bp, Artificial Sequence
  2D10-hVH1-hVL1 heavy chain DNA sequence
caggtacaactcgtgcagtcaggggctgaagtgaagaaacctggggctagtgttaaggtaagctgcaaggctagcggatacacattcacggattactatatcaattgggtgcggcaggctcctggacagggactcgaatggatgggttggatctaccctggatcccaggataccaagtatgcacagaaatttcagggccgcgtcacgatgacagttgacacatccatatcaacagcctacatggaactcagtagattgcggtctgacgacaccgccgtttactattgtgcgaactattttggatcaagcgggtggttctttgacgtttggggccagggtactatggtcacagtgagctctgctagcaccaagggccccagcgtgtttcctctcgctccctgcagccggagcacatccgagagcaccgctgctctgggctgtctcgtgaaggactacttccctgaacccgtcaccgtcagctggaatagcggcgccctgacatccggcgtccacacattccccgctgtcctgcagagcagcggcctgtacagcctgagctccgtggtcaccgtgcctagcagcagcctgggaacaaagacctacacctgcaacgtggaccataagccctccaacaccaaggtggacaagcgggtggaatccaagtatggacccccctgtcctccttgccctgctcctgaatttctcggaggcccctccgtcttcctgtttccccccaagcccaaggacaccctgatgatctcccggacacccgaagtcacctgcgtcgtggtggatgtcagccaggaagatcccgaggtgcagttcaactggtacgtggacggagtggaggtgcataacgccaaaaccaagcccagggaagagcagttcaacagcacctatcgggtcgtgtccgtgctcaccgtcctgcatcaggattggctcaacggcaaggagtacaagtgcaaggtgtccaacaagggcctgccctcctccatcgagaagaccatctccaaggctaagggccaacctcgggagccccaagtgtataccctccctcccagccaggaggagatgaccaagaatcaagtgagcctgacctgcctcgtgaagggattttacccctccgacatcgctgtggaatgggaaagcaatggccaacctgagaacaactacaagaccacaccccccgtgctggactccgatggctccttcttcctgtacagcaggctgaccgtggacaaatcccggtggcaagagggaaacgtgttcagctgctccgtgatgcacgaggctctccacaaccactacacccagaagagcctctccctgagcctcggctagtaa

SEQ ID NO: 1046 - DNA, 1344 bp, Artificial Sequence; identical to SEQ ID NO: 1045
  2D10-hVH1-hVL2 heavy chain DNA sequence

SEQ ID NO: 1047 - DNA, 1344 bp, Artificial Sequence; identical to SEQ ID NO: 1045
  2D10-hVH1-hVL3 heavy chain DNA sequence

SEQ ID NO: 1048 - DNA, 1344 bp, Artificial Sequence; identical to SEQ ID NO: 1045
  2D10-hVH1-hVL4 heavy chain DNA sequence

SEQ ID NO: 1049 - DNA, 1344 bp, Artificial Sequence
  2D10-hVH2-hVL1 heavy chain DNA sequence
caagtccagctggtccagtccggcgctgaagtgaaaaaacccggagcttcagttaaggtgagctgcaaggcttctggctatacattcactgattactatatcaattgggtacgtcaggcacctggccaaggcctcgagtggatggggtggatctatccagggtcccaggacacaaaatataatgaaaaatttcagggacgggtgaccctgacagtggacacctctattagcacggcctatatggagctgtccaggcttaggtctgatgacacagccgtctacttttgtgctaactatttcggctccagcggctggttctttgatgtctggggacaagggacaatggtgaccgtctcctcagctagcaccaagggccccagcgtgtttcctctcgctccctgcagccggagcacatccgagagcaccgctgctctgggctgtctcgtgaaggactacttccctgaacccgtcaccgtcagctggaatagcggcgccctgacatccggcgtccacacattccccgctgtcctgcagagcagcggcctgtacagcctgagctccgtggtcaccgtgcctagcagcagcctgggaacaaagacctacacctgcaacgtggaccataagccctccaacaccaaggtggacaagcgggtggaatccaagtatggacccccctgtcctccttgccctgctcctgaatttctcggaggcccctccgtcttcctgtttccccccaagcccaaggacaccctgatgatctcccggacacccgaagtcacctgcgtcgtggtggatgtcagccaggaagatcccgaggtgcagttcaactggtacgtggacggagtggaggtgcataacgccaaaaccaagcccagggaagagcagttcaacagcacctatcgggtcgtgtccgtgctcaccgtcctgcatcaggattggctcaacggcaaggagtacaagtgcaaggtgtccaacaagggcctgccctcctccatcgagaagaccatctccaaggctaagggccaacctcgggagccccaagtgtataccctccctcccagccaggaggagatgaccaagaatcaagtgagcctgacctgcctcgtgaagggattttacccctccgacatcgctgtggaatgggaaagcaatggccaacctgagaacaactacaagaccacaccccccgtgctggactccgatggctccttcttcctgtacagcaggctgaccgtggacaaatcccggtggcaagagggaaacgtgttcagctgctccgtgatgcacgaggctctccacaaccactacacccagaagagcctctccctgagcctcggctagtaa

SEQ ID NO: 1050 - DNA, 1344 bp, Artificial Sequence; identical to SEQ ID NO: 1049
  2D10-hVH2-hVL2 heavy chain DNA sequence

SEQ ID NO: 1051 - DNA, 1344 bp, Artificial Sequence; identical to SEQ ID NO: 1049
  2D10-hVH2-hVL3 heavy chain DNA sequence

SEQ ID NO: 1052 - DNA, 1344 bp, Artificial Sequence; identical to SEQ ID NO: 1049
  2D10-hVH2-hVL4 heavy chain DNA sequence

SEQ ID NO: 1053 - DNA, 663 bp, Artificial Sequence
  2D10.2B2-v2 light chain DNA sequence
gacatagtaatgacacaggccgcatttagcaatccagtaaccttgggcacatccgcctccatatcttgcaggtcatccaaaagcttgctgcactctgacggtattacttacctgtactggtatttgcagcgacctgggcaatcccctcaactcctgatttaccgcatgagcaacctggcctcaggggtgcctgaccgcttttcaggatcagggagcggcactgacttcaccttgcgaatcagcagagtagaagcagaggatgttggagtttactactgtgcccagatgatcgaatttccacttacttttggggccgggaccattctggagcttaaacgtgctgatgttgcccctactgtgtccatcttccccccctcctccgagcagctgacatccggcggcgcctccgtggtgtgcttcctgaacaacttctaccccaaagacatcaacgtgaaatggaaaatcgacggctccgagaggcagaacggcgtgctgaactcctggacagaccaggactccaaagactccacatactccatgtcctccacactgacactgacaaaagacgagtacgagaggcacaactcctacacatgcgaggccacacacaaaacatccacatcccccatcgtgaaatccttcaacaggaacgagtgctaataa

SEQ ID NO: 1054 - DNA, 660 bp, Artificial Sequence; identical to SEQ ID NO: 760
  2D10-VH0-NDA-VL0 light chain DNA sequence

SEQ ID NO: 1055 - DNA, 660 bp, Artificial Sequence; identical to SEQ ID NO: 760
  2D10-VH0-QDT-VL0 light chain DNA sequence

SEQ ID NO: 1056 - DNA, 660 bp, Artificial Sequence; identical to SEQ ID NO: 760
  2D10-VH0-SDT-VL0 light chain DNA sequence

SEQ ID NO: 1057 - DNA, 660 bp, Artificial Sequence; identical to SEQ ID NO: 760
  2D10-VH0-v1-QDT light chain DNA sequence

SEQ ID NO: 1058 - DNA, 660 bp, Artificial Sequence; identical to SEQ ID NO: 760
  2D10-VH0-v2-QDT light chain DNA sequence

SEQ ID NO: 1059 - DNA, 660 bp, Artificial Sequence; identical to SEQ ID NO: 911
  2D10-hVH1-hVL1 light chain DNA sequence

SEQ ID NO: 1060 - DNA, 660 bp, Artificial Sequence; identical to SEQ ID NO: 912
  2D10-hVH1-hVL2 light chain DNA sequence

SEQ ID NO: 1061 - DNA, 660 bp, Artificial Sequence; identical to SEQ ID NO: 913
  2D10-hVH1-hVL3 light chain DNA sequence

SEQ ID NO: 1062 - DNA, 660 bp, Artificial Sequence; identical to SEQ ID NO: 914
  2D10-hVH1-hVL4 light chain DNA sequence

SEQ ID NO: 1063 - DNA, 660 bp, Artificial Sequence; identical to SEQ ID NO: 911
  2D10-hVH2-hVL1 light chain DNA sequence

SEQ ID NO: 1064 - DNA, 660 bp, Artificial Sequence; identical to SEQ ID NO: 912
  2D10-hVH2-hVL2 light chain DNA sequence

SEQ ID NO: 1065 - DNA, 660 bp, Artificial Sequence; identical to SEQ ID NO: 913
  2D10-hVH2-hVL3 light chain DNA sequence

SEQ ID NO: 1066 - DNA, 660 bp, Artificial Sequence; identical to SEQ ID NO: 914
  2D10-hVH2-hVL4 light chain DNA sequence

SEQ ID NO: 1067 - protein, 116 aa, Artificial Sequence; identical to SEQ ID NO: 305
  VH-109 Peptide Sequence

SEQ ID NO: 1068 - protein, 116 aa, Artificial Sequence; identical to SEQ ID NO: 305
  VH-110 Peptide Sequence

SEQ ID NO: 1069 - protein, 116 aa, Artificial Sequence; identical to SEQ ID NO: 305
  VH-111 Peptide Sequence

SEQ ID NO: 1070 - protein, 116 aa, Artificial Sequence
  VH-112 Peptide Sequence
QIQLVQSGPELKKPGESVKISCKASGYAFTTYGMSWVQQAPGKGLKWMGWVNTYSGVPTYADDFKGRFAFSLETSASTAYLQINNLRNEDTATYFCARGPYAMDYWGQGTSVTVSS

SEQ ID NO: 1071 - protein, 116 aa, Artificial Sequence; identical to SEQ ID NO: 1070
  VH-113 Peptide Sequence

SEQ ID NO: 1072 - protein, 116 aa, Artificial Sequence
  VH-114 Peptide Sequence
QIQLVQSGPELKKPGESVKISCKASGYAFTTYGMSWVQQAPGKGLKWMGWVNTYSGVPTSADDFKGRFAFSLETSASTAYLQINNLRNEDTATYFCARGPYAMDYWGQGTSVTVSS

SEQ ID NO: 1073 - protein, 116 aa, Artificial Sequence; identical to SEQ ID NO: 1072
  VH-115 Peptide Sequence

SEQ ID NO: 1074 - protein, 116 aa, Artificial Sequence
  VH-116 Peptide Sequence
QVQLVQSGSELKKPGASVKVSCKASGYAFTTYGMSWVRQAPGQGLEWMGWVNTYSGVPTYAQGFTGRFVFSLDTSVSTAYLQISSLKAEDTAVYYCARGPYAMDYWGQGTLVTVSS

SEQ ID NO: 1075 - protein, 116 aa, Artificial Sequence; identical to SEQ ID NO: 1074
  VH-117 Peptide Sequence

SEQ ID NO: 1076 - protein, 116 aa, Artificial Sequence; identical to SEQ ID NO: 1074
  VH-118 Peptide Sequence

SEQ ID NO: 1077 - protein, 116 aa, Artificial Sequence; identical to SEQ ID NO: 1074
  VH-119 Peptide Sequence

SEQ ID NO: 1078 - protein, 116 aa, Artificial Sequence; identical to SEQ ID NO: 1074
  VH-120 Peptide Sequence

SEQ ID NO: 1079 - protein, 116 aa, Artificial Sequence; identical to SEQ ID NO: 1074
  VH-121 Peptide Sequence

SEQ ID NO: 1080 - protein, 116 aa, Artificial Sequence
  VH-122 Peptide Sequence
QVQLVQSGSELKKPGASVKVSCKASGYAFTTYGMSWVRQAPGQGLEWMGWVNTYSGVPTSAQGFTGRFVFSLDTSVSTAYLQISSLKAEDTAVYYCARGPYAMDYWGQGTLVTVSS

SEQ ID NO: 1081 - protein, 116 aa, Artificial Sequence; identical to SEQ ID NO: 1080
  VH-123 Peptide Sequence

SEQ ID NO: 1082 - protein, 116 aa, Artificial Sequence; identical to SEQ ID NO: 1080
  VH-124 Peptide Sequence

SEQ ID NO: 1083 - protein, 116 aa, Artificial Sequence; identical to SEQ ID NO: 1080
  VH-125 Peptide Sequence

SEQ ID NO: 1084 - protein, 116 aa, Artificial Sequence; identical to SEQ ID NO: 814
  VH-126 Peptide Sequence

SEQ ID NO: 1085 - protein, 116 aa, Artificial Sequence; identical to SEQ ID NO: 814
  VH-127 Peptide Sequence

SEQ ID NO: 1086 - protein, 116 aa, Artificial Sequence; identical to SEQ ID NO: 816
  VH-128 Peptide Sequence

SEQ ID NO: 1087 - protein, 116 aa, Artificial Sequence; identical to SEQ ID NO: 816
  VH-129 Peptide Sequence

SEQ ID NO: 1088 - protein, 116 aa, Artificial Sequence; identical to SEQ ID NO: 816
  VH-130 Peptide Sequence

SEQ ID NO: 1089 - protein, 116 aa, Artificial Sequence; identical to SEQ ID NO: 816
  VH-131 Peptide Sequence

SEQ ID NO: 1090 - protein, 116 aa, Artificial Sequence; identical to SEQ ID NO: 817
  VH-132 Peptide Sequence

SEQ ID NO: 1091 - protein, 116 aa, Artificial Sequence; identical to SEQ ID NO: 817
  VH-133 Peptide Sequence

SEQ ID NO: 1092 - protein, 116 aa, Artificial Sequence; identical to SEQ ID NO: 819
  VH-134 Peptide Sequence

SEQ ID NO: 1093 - protein, 116 aa, Artificial Sequence; identical to SEQ ID NO: 819
  VH-135 Peptide Sequence

SEQ ID NO: 1094 - protein, 116 aa, Artificial Sequence; identical to SEQ ID NO: 819
  VH-136 Peptide Sequence

SEQ ID NO: 1095 - protein, 116 aa, Artificial Sequence
  VH-137 Peptide Sequence
QIQLVQSGFELKKPGASVKISCKASGYAFTTYGMSWVRQAPGQGLEWMGWVNTYSGVPTYADAFTGRFVFSLDTSVSTAYLQISSLKAEDTAVYFCARGPYAMDYWGQGTLVTVSS

SEQ ID NO: 1096 - protein, 116 aa, Artificial Sequence; identical to SEQ ID NO: 1095
  VH-138 Peptide Sequence

SEQ ID NO: 1097 - protein, 116 aa, Artificial Sequence; identical to SEQ ID NO: 1095
  VH-139 Peptide Sequence

SEQ ID NO: 1098 - protein, 116 aa, Artificial Sequence; identical to SEQ ID NO: 1095
  VH-140 Peptide Sequence

SEQ ID NO: 1099 - protein, 116 aa, Artificial Sequence; identical to SEQ ID NO: 1095
  VH-141 Peptide Sequence

SEQ ID NO: 1100 - protein, 116 aa, Artificial Sequence; identical to SEQ ID NO: 1095
  VH-142 Peptide Sequence

SEQ ID NO: 1101 - protein, 116 aa, Artificial Sequence; identical to SEQ ID NO: 814
  VH-143 Peptide Sequence

SEQ ID NO: 1102 - protein, 116 aa, Artificial Sequence; identical to SEQ ID NO: 814
  VH-144 Peptide Sequence

SEQ ID NO: 1103 - protein, 116 aa, Artificial Sequence; identical to SEQ ID NO: 814
  VH-145 Peptide Sequence

SEQ ID NO: 1104 - protein, 116 aa, Artificial Sequence; identical to SEQ ID NO: 817
  VH-146 Peptide Sequence

SEQ ID NO: 1105 - protein, 116 aa, Artificial Sequence; identical to SEQ ID NO: 817
  VH-147 Peptide Sequence

SEQ ID NO: 1106 - protein, 116 aa, Artificial Sequence; identical to SEQ ID NO: 817
  VH-148 Peptide Sequence

SEQ ID NO: 1107 - protein, 116 aa, Artificial Sequence; identical to SEQ ID NO: 819
  VH-149 Peptide Sequence

SEQ ID NO: 1108 - protein, 116 aa, Artificial Sequence; identical to SEQ ID NO: 819
  VH-150 Peptide Sequence

SEQ ID NO: 1109 - protein, 116 aa, Artificial Sequence; identical to SEQ ID NO: 819
  VH-151 Peptide Sequence

SEQ ID NO: 1110 - protein, 107 aa, Artificial Sequence; identical to SEQ ID NO: 382
  VL-107 Peptide Sequence

SEQ ID NO: 1111 - protein, 107 aa, Artificial Sequence
  VL-108 Peptide Sequence
DIQMTQTTSSLSASLGDRVTINCSASQDISNYLNWYQQKPDGTVKLLIYYTSSLLSGVPSRFSGSGSGTDYSLTISNLEPEDIATYFCQQYSKLPYTFGSGTKLEIK

SEQ ID NO: 1112 - protein, 107 aa, Artificial Sequence
  VL-109 Peptide Sequence
DIQMTQTTSSLSASLGDRVTISCSASQDISNYLNWYQQKPDGTVKLLIYYTSSLLSGVPSRFSGSGSGTDYSLTISNLEPEDIATYFCQQYSKLPYTFGSGTHLEIK

SEQ ID NO: 1113 - protein, 107 aa, Artificial Sequence; identical to SEQ ID NO: 382
  VL-110 Peptide Sequence

SEQ ID NO: 1114 - protein, 107 aa, Artificial Sequence; identical to SEQ ID NO: 1112
  VL-111 Peptide Sequence

SEQ ID NO: 1115 - protein, 107 aa, Artificial Sequence; identical to SEQ ID NO: 382
  VL-112 Peptide Sequence

SEQ ID NO: 1116 - protein, 107 aa, Artificial Sequence; identical to SEQ ID NO: 1112
  VL-113 Peptide Sequence

SEQ ID NO: 1117 - protein, 107 aa, Artificial Sequence; identical to SEQ ID NO: 829
  VL-114 Peptide Sequence

SEQ ID NO: 1118 - protein, 107 aa, Artificial Sequence
  VL-115 Peptide Sequence
DIQMTQSPSSLSASVGDRVTITCSASQDISNYLNWYQQKPGKAPKLLIYYTSSLLTGVPSRFSGSGSGTDYTFTISSLQPEDIATYFCQQYSKLPYTFGQGTKLEIK

SEQ ID NO: 1119 - protein, 107 aa, Artificial Sequence; identical to SEQ ID NO: 830
  VL-116 Peptide Sequence

SEQ ID NO: 1120 - protein, 107 aa, Artificial Sequence
  VL-117 Peptide Sequence
DIQMTQSPSSLSASVGDRVTITCSASQDISNYLNWYQQKPGKAPKLLIYYTSSLLSGVPSRFSGSGSGTDYTLTISSLQPEDFATYFCQQYSKLPYTFGQGTKLEIK

SEQ ID NO: 1121 - protein, 107 aa, Artificial Sequence
  VL-118 Peptide Sequence
DIQMTQSPSSLSASVGDRVTINCSASQDISNYLNWYQQKPGKAPKLLIYYTSSLLTGVPSRFSGSGSGTDYTFTISSLQPEDIATYFCQQYSKLPYTFGQGTKLEIK

SEQ ID NO: 1122 - protein, 107 aa, Artificial Sequence
  VL-119 Peptide Sequence
DIQMTQSPSSLSASVGDRVTINCSASQDISNYLNWYQQKPGKAPKLLIYYTSSLLSGVPSRFSGSGSGTDYTLTISSLQPEDFATYFCQQYSKLPYTFGQGTKLEIK

SEQ ID NO: 1123 - protein, 107 aa, Artificial Sequence; identical to SEQ ID NO: 830
  VL-120 Peptide Sequence

SEQ ID NO: 1124 - protein, 107 aa, Artificial Sequence; identical to SEQ ID NO: 1120
  VL-121 Peptide Sequence

SEQ ID NO: 1125 - protein, 107 aa, Artificial Sequence; identical to SEQ ID NO: 1121
  VL-122 Peptide Sequence

SEQ ID NO: 1126 - protein, 107 aa, Artificial Sequence; identical to SEQ ID NO: 1122
  VL-123 Peptide Sequence

SEQ ID NO: 1127 - protein, 107 aa, Artificial Sequence; identical to SEQ ID NO: 1121
  VL-124 Peptide Sequence

SEQ ID NO: 1128 - protein, 107 aa, Artificial Sequence; identical to SEQ ID NO: 1122
  VL-125 Peptide Sequence

SEQ ID NO: 1129 - protein, 107 aa, Artificial Sequence; identical to SEQ ID NO: 830
  VL-126 Peptide Sequence

SEQ ID NO: 1130 - protein, 107 aa, Artificial Sequence; identical to SEQ ID NO: 1120
  VL-127 Peptide Sequence

SEQ ID NO: 1131 - protein, 107 aa, Artificial Sequence; identical to SEQ ID NO: 1121
  VL-128 Peptide Sequence

SEQ ID NO: 1132 - protein, 107 aa, Artificial Sequence; identical to SEQ ID NO: 1122
  VL-129 Peptide Sequence

SEQ ID NO: 1133 - protein, 107 aa, Artificial Sequence; identical to SEQ ID NO: 1121
  VL-130 Peptide Sequence

SEQ ID NO: 1134 - protein, 107 aa, Artificial Sequence; identical to SEQ ID NO: 1122
  VL-131 Peptide Sequence

SEQ ID NO: 1135 - protein, 107 aa, Artificial Sequence; identical to SEQ ID NO: 1120
  VL-132 Peptide Sequence

SEQ ID NO: 1136 - protein, 107 aa, Artificial Sequence; identical to SEQ ID NO: 1121
  VL-133 Peptide Sequence

SEQ ID NO: 1137 - protein, 107 aa, Artificial Sequence; identical to SEQ ID NO: 1122
  VL-134 Peptide Sequence

SEQ ID NO: 1138 - protein, 107 aa, Artificial Sequence; identical to SEQ ID NO: 829
  VL-135 Peptide Sequence

SEQ ID NO: 1139 - protein, 107 aa, Artificial Sequence; identical to SEQ ID NO: 1118
  VL-136 Peptide Sequence

SEQ ID NO: 1140 - protein, 107 aa, Artificial Sequence; identical to SEQ ID NO: 830
  VL-137 Peptide Sequence

SEQ ID NO: 1141 - protein, 107 aa, Artificial Sequence; identical to SEQ ID NO: 1120
  VL-138 Peptide Sequence

SEQ ID NO: 1142 - protein, 107 aa, Artificial Sequence; identical to SEQ ID NO: 1121
  VL-139 Peptide Sequence

SEQ ID NO: 1143 - protein, 107 aa, Artificial Sequence; identical to SEQ ID NO: 1122
  VL-140 Peptide Sequence

SEQ ID NO: 1144 - protein, 107 aa, Artificial Sequence; identical to SEQ ID NO: 829
  VL-141 Peptide Sequence

SEQ ID NO: 1145 - protein, 107 aa, Artificial Sequence; identical to SEQ ID NO: 829
  VL-142 Peptide Sequence

SEQ ID NO: 1146 - protein, 107 aa, Artificial Sequence; identical to SEQ ID NO: 829
  VL-143 Peptide Sequence

SEQ ID NO: 1147 - protein, 107 aa, Artificial Sequence; identical to SEQ ID NO: 829
  VL-144 Peptide Sequence

SEQ ID NO: 1148 - protein, 107 aa, Artificial Sequence; identical to SEQ ID NO: 829
  VL-145 Peptide Sequence

SEQ ID NO: 1149 - protein, 107 aa, Artificial Sequence; identical to SEQ ID NO: 829
  VL-146 Peptide Sequence

SEQ ID NO: 1150 - protein, 107 aa, Artificial Sequence; identical to SEQ ID NO: 829
  VL-147 Peptide Sequence

SEQ ID NO: 1151 - protein, 107 aa, Artificial Sequence; identical to SEQ ID NO: 829
  VL-148 Peptide Sequence

SEQ ID NO: 1152 - protein, 107 aa, Artificial Sequence; identical to SEQ ID NO: 829
  VL-149 Peptide Sequence

SEQ ID NO: 1153 - protein, 442 aa, Artificial Sequence
  20H5.A3-hIgG4 (S228P) heavy chain peptide sequence
QIQLVQSGPELKKPGESVKISCKASGYAFTTYGMSWVQQAPGKGLKWMGWVNTYSGVPTCADDFKGRFAFSLETSASTAYLQINNLRNEDTATYFCARGPYAMDYWGQGTSVTVSSASTKGPSVFPLAPCSRSTSESTAALGCLVKDYFPEPVTVSWNSGALTSGVHTFPAVLQSSGLYSLSSVVTVPSSSLGTKTYTCNVDHKPSNTKVDKRVESKYGPPCPPCPAPEFLGGPSVFLFPPKPKDTLMISRTPEVTCVVVDVSQEDPEVQFNWYVDGVEVHNAKTKPREEQFNSTYRVVSVLTVLHQDWLNGKEYKCKVSNKGLPSSIEKTISKAKGQPREPQVYTLPPSQEEMTKNQVSLTCLVKGFYPSDIAVEWESNGQPENNYKTTPPVLDSDGSFFLYSRLTVDKSRWQEGNVFSCSVMHEALHNHYTQKSLSLSLG

SEQ ID NO: 1154 - protein, 442 aa, Artificial Sequence; identical to SEQ ID NO: 1153
  20H5.A3-hIgG4 (S28P)-mv2 heavy chain peptide sequence

SEQ ID NO: 1155 - protein, 442 aa, Artificial Sequence; identical to SEQ ID NO: 1153
  798-9.20H5.A3-mH0mL1 heavy chain peptide sequence

SEQ ID NO: 1156 - protein, 442 aa, Artificial Sequence
  798-9.20H5.A3-mH1mL0 heavy chain peptide sequence
QIQLVQSGPELKKPGESVKISCKASGYAFTTYGMSWVQQAPGKGLKWMGWVNTYSGVPTYADDFKGRFAFSLETSASTAYLQINNLRNEDTATYFCARGPYAMDYWGQGTSVTVSSASTKGPSVFPLAPCSRSTSESTAALGCLVKDYFPEPVTVSWNSGALTSGVHTFPAVLQSSGLYSLSSVVTVPSSSLGTKTYTCNVDHKPSNTKVDKRVESKYGPPCPPCPAPEFLGGPSVFLFPPKPKDTLMISRTPEVTCVVVDVSQEDPEVQFNWYVDGVEVHNAKTKPREEQFNSTYRVVSVLTVLHQDWLNGKEYKCKVSNKGLPSSIEKTISKAKGQPREPQVYTLPPSQEEMTKNQVSLTCLVKGFYPSDIAVEWESNGQPENNYKTTPPVLDSDGSFFLYSRLTVDKSRWQEGNVFSCSVMHEALHNHYTQKSLSLSLG

SEQ ID NO: 1157 - protein, 442 aa, Artificial Sequence; identical to SEQ ID NO: 1156
  798-9.20H5.A3-mH1mL1 heavy chain peptide sequence

SEQ ID NO: 1158 - protein, 442 aa, Artificial Sequence
  798-9.20H5.A3-mH2mL0 heavy chain peptide sequence
QIQLVQSGPELKKPGESVKISCKASGYAFTTYGMSWVQQAPGKGLKWMGWVNTYSGVPTSADDFKGRFAFSLETSASTAYLQINNLRNEDTATYFCARGPYAMDYWGQGTSVTVSSASTKGPSVFPLAPCSRSTSESTAALGCLVKDYFPEPVTVSWNSGALTSGVHTFPAVLQSSGLYSLSSVVTVPSSSLGTKTYTCNVDHKPSNTKVDKRVESKYGPPCPPCPAPEFLGGPSVFLFPPKPKDTLMISRTPEVTCVVVDVSQEDPEVQFNWYVDGVEVHNAKTKPREEQFNSTYRVVSVLTVLHQDWLNGKEYKCKVSNKGLPSSIEKTISKAKGQPREPQVYTLPPSQEEMTKNQVSLTCLVKGFYPSDIAVEWESNGQPENNYKTTPPVLDSDGSFFLYSRLTVDKSRWQEGNVFSCSVMHEALHNHYTQKSLSLSLG

SEQ ID NO: 1159 - protein, 442 aa, Artificial Sequence; identical to SEQ ID NO: 1158
  798-9.20H5.A3-mH2mL1 heavy chain peptide sequence

SEQ ID NO: 1160 - protein, 442 aa, Artificial Sequence
  20H5.A3-VH1VL1 heavy chain peptide sequence
QVQLVQSGSELKKPGASVKVSCKASGYAFTTYGMSWVRQAPGQGLEWMGWVNTYSGVPTYAQGFTGRFVFSLDTSVSTAYLQISSLKAEDTAVYYCARGPYAMDYWGQGTLVTVSSASTKGPSVFPLAPCSRSTSESTAALGCLVKDYFPEPVTVSWNSGALTSGVHTFPAVLQSSGLYSLSSVVTVPSSSLGTKTYTCNVDHKPSNTKVDKRVESKYGPPCPPCPAPEFLGGPSVFLFPPKPKDTLMISRTPEVTCVVVDVSQEDPEVQFNWYVDGVEVHNAKTKPREEQFNSTYRVVSVLTVLHQDWLNGKEYKCKVSNKGLPSSIEKTISKAKGQPREPQVYTLPPSQEEMTKNQVSLTCLVKGFYPSDIAVEWESNGQPENNYKTTPPVLDSDGSFFLYSRLTVDKSRWQEGNVFSCSVMHEALHNHYTQKSLSLSLG

SEQ ID NO: 1161 - protein, 442 aa, Artificial Sequence; identical to SEQ ID NO: 1160
  20H5.A3-VH1VL2 heavy chain peptide sequence

SEQ ID NO: 1162 - protein, 442 aa, Artificial Sequence; identical to SEQ ID NO: 1160
  20H5.A3-VH1VL3 heavy chain peptide sequence

SEQ ID NO: 1163 - protein, 442 aa, Artificial Sequence; identical to SEQ ID NO: 1160
  20H5.A3-VH1VL4 heavy chain peptide sequence

SEQ ID NO: 1164 - protein, 442 aa, Artificial Sequence; identical to SEQ ID NO: 1160
  20H5.A3-VH1VL5 heavy chain peptide sequence

SEQ ID NO: 1165 - protein, 442 aa, Artificial Sequence; identical to SEQ ID NO: 1160
  20H5.A3-VH1VL6 heavy chain peptide sequence

SEQ ID NO: 1166 - protein, 442 aa, Artificial Sequence
  20H5.A3-VH2VL3 heavy chain peptide sequence
QVQLVQSGSELKKPGASVKVSCKASGYAFTTYGMSWVRQAPGQGLEWMGWVNTYSGVPTSAQGFTGRFVFSLDTSVSTAYLQISSLKAEDTAVYYCARGPYAMDYWGQGTLVTVSSASTKGPSVFPLAPCSRSTSESTAALGCLVKDYFPEPVTVSWNSGALTSGVHTFPAVLQSSGLYSLSSVVTVPSSSLGTKTYTCNVDHKPSNTKVDKRVESKYGPPCPPCPAPEFLGGPSVFLFPPKPKDTLMISRTPEVTCVVVDVSQEDPEVQFNWYVDGVEVHNAKTKPREEQFNSTYRVVSVLTVLHQDWLNGKEYKCKVSNKGLPSSIEKTISKAKGQPREPQVYTLPPSQEEMTKNQVSLTCLVKGFYPSDIAVEWESNGQPENNYKTTPPVLDSDGSFFLYSRLTVDKSRWQEGNVFSCSVMHEALHNHYTQKSLSLSLG

SEQ ID NO: 1167 - protein, 442 aa, Artificial Sequence; identical to SEQ ID NO: 1166
  20H5.A3-VH2VL4 heavy chain peptide sequence

SEQ ID NO: 1168 - protein, 442 aa, Artificial Sequence; identical to SEQ ID NO: 1166
  20H5.A3-VH2VL5 heavy chain peptide sequence

SEQ ID NO: 1169 - protein, 442 aa, Artificial Sequence; identical to SEQ ID NO: 1166
  20H5.A3-VH2VL6 heavy chain peptide sequence

SEQ ID NO: 1170 - protein, 442 aa, Artificial Sequence; identical to SEQ ID NO: 844
  20H5.A3-VH3VL5 heavy chain peptide sequence

SEQ ID NO: 1171 - protein, 442 aa, Artificial Sequence; identical to SEQ ID NO: 844
  20H5.A3-VH3VL6 heavy chain peptide sequence

SEQ ID NO: 1172 - protein, 442 aa, Artificial Sequence; identical to SEQ ID NO: 846
  20H5.A3-VH4VL3 heavy chain peptide sequence

SEQ ID NO: 1173 - protein, 442 aa, Artificial Sequence; identical to SEQ ID NO: 846
  20H5.A3-VH4VL4 heavy chain peptide sequence

SEQ ID NO: 1174 - protein, 442 aa, Artificial Sequence; identical to SEQ ID NO: 846
  20H5.A3-VH4VL5 heavy chain peptide sequence

SEQ ID NO: 1175 - protein, 442 aa, Artificial Sequence; identical to SEQ ID NO: 846
  20H5.A3-VH4VL6 heavy chain peptide sequence

SEQ ID NO: 1176 - protein, 442 aa, Artificial Sequence; identical to SEQ ID NO: 847
  20H5.A3-VH5VL5 heavy chain peptide sequence

SEQ ID NO: 1177 - protein, 442 aa, Artificial Sequence; identical to SEQ ID NO: 847
  20H5.A3-VH5VL6 heavy chain peptide sequence

SEQ ID NO: 1178 - protein, 442 aa, Artificial Sequence; identical to SEQ ID NO: 849
  20H5.A3-VH6VL4 heavy chain peptide sequence

SEQ ID NO: 1179 - protein, 442 aa, Artificial Sequence; identical to SEQ ID NO: 849
  20H5.A3-VH6VL5 heavy chain peptide sequence

SEQ ID NO: 1180 - protein, 442 aa, Artificial Sequence; identical to SEQ ID NO: 849
  20H5.A3-VH6VL6 heavy chain peptide sequence

SEQ ID NO: 1181 - protein, 442 aa, Artificial Sequence
  20H5.A3-VH7VL1 heavy chain peptide sequence
QIQLVQSGFELKKPGASVKISCKASGYAFTTYGMSWVRQAPGQGLEWMGWVNTYSGVPTYADAFTGRFVFSLDTSVSTAYLQISSLKAEDTAVYFCARGPYAMDYWGQGTLVTVSSASTKGPSVFPLAPCSRSTSESTAALGCLVKDYFPEPVTVSWNSGALTSGVHTFPAVLQSSGLYSLSSVVTVPSSSLGTKTYTCNVDHKPSNTKVDKRVESKYGPPCPPCPAPEFLGGPSVFLFPPKPKDTLMISRTPEVTCVVVDVSQEDPEVQFNWYVDGVEVHNAKTKPREEQFNSTYRVVSVLTVLHQDWLNGKEYKCKVSNKGLPSSIEKTISKAKGQPREPQVYTLPPSQEEMTKNQVSLTCLVKGFYPSDIAVEWESNGQPENNYKTTPPVLDSDGSFFLYSRLTVDKSRWQEGNVFSCSVMHEALHNHYTQKSLSLSLG

SEQ ID NO: 1182 - protein, 442 aa, Artificial Sequence; identical to SEQ ID NO: 1181
  20H5.A3-VH7VL2 heavy chain peptide sequence

SEQ ID NO: 1183 - protein, 442 aa, Artificial Sequence; identical to SEQ ID NO: 1181
  20H5.A3-VH7VL3 heavy chain peptide sequence

SEQ ID NO: 1184 - protein, 442 aa, Artificial Sequence; identical to SEQ ID NO: 1181
  20H5.A3-VH7VL4 heavy chain peptide sequence

SEQ ID NO: 1185 - protein, 442 aa, Artificial Sequence; identical to SEQ ID NO: 1181
  20H5.A3-VH7VL5 heavy chain peptide sequence

SEQ ID NO: 1186 - protein, 442 aa, Artificial Sequence; identical to SEQ ID NO: 1181
  20H5.A3-VH7VL6 heavy chain peptide sequence

SEQ ID NO: 1187 - protein, 445 aa, Artificial Sequence
  20H5.A3_hVH3VL1-hIgG1 (KEMv2) heavy chain peptide sequence
QIQLVQSGSELKKPGASVKVSCKASGYAFTTYGMSWVRQAPGQGLEWMGWVNTYSGVPTYADDFTGRFVFSLETSVSTAYLQISSLKAEDTAVYFCARGPYAMDYWGQGTLVTVSSASTKGPSVFPLAPSSKSTSGGTAALGCLVKDYFPEPVTVSWNSGALTSGVHTFPAVLQSSGLYSLSSVVTVPSSSLGTQTYICNVNHKPSNTKVDKKVEPKSCDKTHTCPPCPAPELLGGPSVFLFPPKPKDTLMISRTPEVTCVVVDVSHEDPEVKFNWYVDGVEVHNAKTKPREEQYNSTYRVVSVLTVLHQDWLNGKEYKCKVSNKALPAPIEKTISKAKGQPREPQVYTLPPSREEMTKNQVSLTCLVKGFYPSDIAVEWESNGQPENNYKTTPPVLDSDGSFFLYSKLTVDKSRWQQGNVFSCSVMHEALHNHYTQKSLSLSPG

SEQ ID NO: 1188 - protein, 445 aa, Artificial Sequence
  20H5.A3_hVH3VL1-hIgG1 (LALAPGv2) heavy chain peptide sequence
QIQLVQSGSELKKPGASVKVSCKASGYAFTTYGMSWVRQAPGQGLEWMGWVNTYSGVPTYADDFTGRFVFSLETSVSTAYLQISSLKAEDTAVYFCARGPYAMDYWGQGTLVTVSSASTKGPSVFPLAPSSKSTSGGTAALGCLVKDYFPEPVTVSWNSGALTSGVHTFPAVLQSSGLYSLSSVVTVPSSSLGTQTYICNVNHKPSNTKVDKKVEPKSCDKTHTCPPCPAPEAAGGPSVFLFPPKPKDTLMISRTPEVTCVVVDVSHEDPEVKFNWYVDGVEVHNAKTKPREEQYNSTYRVVSVLTVLHQDWLNGKEYKCKVSNKALGAPIEKTISKAKGQPREPQVYTLPPSREEMTKNQVSLTCLVKGFYPSDIAVEWESNGQPENNYKTTPPVLDSDGSFFLYSKLTVDKSRWQQGNVFSCSVMHEALHNHYTQKSLSLSPG

SEQ ID NO: 1189 - protein, 445 aa, Artificial Sequence
  20H5.A3_hVH3VL1-hIgG1 (REM) heavy chain peptide sequence
QIQLVQSGSELKKPGASVKVSCKASGYAFTTYGMSWVRQAPGQGLEWMGWVNTYSGVPTYADDFTGRFVFSLETSVSTAYLQISSLKAEDTAVYFCARGPYAMDYWGQGTLVTVSSASTKGPSVFPLAPSSKSTSGGTAALGCLVKDYFPEPVTVSWNSGALTSGVHTFPAVLQSSGLYSLSSVVTVPSSSLGTQTYICNVNHKPSNTKVDKRVEPKSCDKTHTCPPCPAPELLGGPSVFLFPPKPKDTLMISRTPEVTCVVVDVSHEDPEVKFNWYVDGVEVHNAKTKPREEQYNSTYRVVSVLTVLHQDWLNGKEYKCKVSNKALPAPIEKTISKAKGQPREPQVYTLPPSREEMTKNQVSLTCLVKGFYPSDIAVEWESNGQPENNYKTTPPVLDSDGSFFLYSKLTVDKSRWQQGNVFSCSVMHEALHNHYTQKSLSLSPG

SEQ ID NO: 1190 - protein, 445 aa, Artificial Sequence
  20H5.A3_hVH5VL1-hIgG1 (KEMv2) heavy chain peptide sequence
QVQLVQSGFELKKPGASVKISCKASGYAFTTYGMSWVRQAPGQGLEWMGWVNTYSGVPTYAQAFTGRFVFSLDTSVSTAYLQISSLKAEDTAVYYCARGPYAMDYWGQGTLVTVSSASTKGPSVFPLAPSSKSTSGGTAALGCLVKDYFPEPVTVSWNSGALTSGVHTFPAVLQSSGLYSLSSVVTVPSSSLGTQTYICNVNHKPSNTKVDKKVEPKSCDKTHTCPPCPAPELLGGPSVFLFPPKPKDTLMISRTPEVTCVVVDVSHEDPEVKFNWYVDGVEVHNAKTKPREEQYNSTYRVVSVLTVLHQDWLNGKEYKCKVSNKALPAPIEKTISKAKGQPREPQVYTLPPSREEMTKNQVSLTCLVKGFYPSDIAVEWESNGQPENNYKTTPPVLDSDGSFFLYSKLTVDKSRWQQGNVFSCSVMHEALHNHYTQKSLSLSPG

SEQ ID NO: 1191 - protein, 445 aa, Artificial Sequence
  20H5.A3_hVH5VL1-hIgG1 (LALAPGv2) heavy chain peptide sequence
QVQLVQSGFELKKPGASVKISCKASGYAFTTYGMSWVRQAPGQGLEWMGWVNTYSGVPTYAQAFTGRFVFSLDTSVSTAYLQISSLKAEDTAVYYCARGPYAMDYWGQGTLVTVSSASTKGPSVFPLAPSSKSTSGGTAALGCLVKDYFPEPVTVSWNSGALTSGVHTFPAVLQSSGLYSLSSVVTVPSSSLGTQTYICNVNHKPSNTKVDKKVEPKSCDKTHTCPPCPAPEAAGGPSVFLFPPKPKDTLMISRTPEVTCVVVDVSHEDPEVKFNWYVDGVEVHNAKTKPREEQYNSTYRVVSVLTVLHQDWLNGKEYKCKVSNKALGAPIEKTISKAKGQPREPQVYTLPPSREEMTKNQVSLTCLVKGFYPSDIAVEWESNGQPENNYKTTPPVLDSDGSFFLYSKLTVDKSRWQQGNVFSCSVMHEALHNHYTQKSLSLSPG

SEQ ID NO: 1192 - protein, 445 aa, Artificial Sequence
  20H5.A3_hVH5VL1-hIgG1 (REM) heavy chain peptide sequence
QVQLVQSGFELKKPGASVKISCKASGYAFTTYGMSWVRQAPGQGLEWMGWVNTYSGVPTYAQAFTGRFVFSLDTSVSTAYLQISSLKAEDTAVYYCARGPYAMDYWGQGTLVTVSSASTKGPSVFPLAPSSKSTSGGTAALGCLVKDYFPEPVTVSWNSGALTSGVHTFPAVLQSSGLYSLSSVVTVPSSSLGTQTYICNVNHKPSNTKVDKRVEPKSCDKTHTCPPCPAPELLGGPSVFLFPPKPKDTLMISRTPEVTCVVVDVSHEDPEVKFNWYVDGVEVHNAKTKPREEQYNSTYRVVSVLTVLHQDWLNGKEYKCKVSNKALPAPIEKTISKAKGQPREPQVYTLPPSREEMTKNQVSLTCLVKGFYPSDIAVEWESNGQPENNYKTTPPVLDSDGSFFLYSKLTVDKSRWQQGNVFSCSVMHEALHNHYTQKSLSLSPG

SEQ ID NO: 1193 - protein, 445 aa, Artificial Sequence
  20H5.A3_hVH6VL1-hIgG1 (KEMv2) heavy chain peptide sequence
QVQLVQSGFELKKPGASVKISCKASGYAFTTYGMSWVRQAPGQGLEWMGWVNTYSGVPTSAQAFTGRFVFSLDTSVSTAYLQISSLKAEDTAVYYCARGPYAMDYWGQGTLVTVSSASTKGPSVFPLAPSSKSTSGGTAALGCLVKDYFPEPVTVSWNSGALTSGVHTFPAVLQSSGLYSLSSVVTVPSSSLGTQTYICNVNHKPSNTKVDKKVEPKSCDKTHTCPPCPAPELLGGPSVFLFPPKPKDTLMISRTPEVTCVVVDVSHEDPEVKFNWYVDGVEVHNAKTKPREEQYNSTYRVVSVLTVLHQDWLNGKEYKCKVSNKALPAPIEKTISKAKGQPREPQVYTLPPSREEMTKNQVSLTCLVKGFYPSDIAVEWESNGQPENNYKTTPPVLDSDGSFFLYSKLTVDKSRWQQGNVFSCSVMHEALHNHYTQKSLSLSPG

SEQ ID NO: 1194 - protein, 445 aa, Artificial Sequence
  20H5.A3_hVH6VL1-hIgG1 (LALAPGv2) heavy chain peptide sequence
QVQLVQSGFELKKPGASVKISCKASGYAFTTYGMSWVRQAPGQGLEWMGWVNTYSGVPTSAQAFTGRFVFSLDTSVSTAYLQISSLKAEDTAVYYCARGPYAMDYWGQGTLVTVSSASTKGPSVFPLAPSSKSTSGGTAALGCLVKDYFPEPVTVSWNSGALTSGVHTFPAVLQSSGLYSLSSVVTVPSSSLGTQTYICNVNHKPSNTKVDKKVEPKSCDKTHTCPPCPAPEAAGGPSVFLFPPKPKDTLMISRTPEVTCVVVDVSHEDPEVKFNWYVDGVEVHNAKTKPREEQYNSTYRVVSVLTVLHQDWLNGKEYKCKVSNKALGAPIEKTISKAKGQPREPQVYTLPPSREEMTKNQVSLTCLVKGFYPSDIAVEWESNGQPENNYKTTPPVLDSDGSFFLYSKLTVDKSRWQQGNVFSCSVMHEALHNHYTQKSLSLSPG

SEQ ID NO: 1195 - protein, 445 aa, Artificial Sequence
  20H5.A3_hVH6VL1-hIgG1 (REM) heavy chain peptide sequence
QVQLVQSGFELKKPGASVKISCKASGYAFTTYGMSWVRQAPGQGLEWMGWVNTYSGVPTSAQAFTGRFVFSLDTSVSTAYLQISSLKAEDTAVYYCARGPYAMDYWGQGTLVTVSSASTKGPSVFPLAPSSKSTSGGTAALGCLVKDYFPEPVTVSWNSGALTSGVHTFPAVLQSSGLYSLSSVVTVPSSSLGTQTYICNVNHKPSNTKVDKRVEPKSCDKTHTCPPCPAPELLGGPSVFLFPPKPKDTLMISRTPEVTCVVVDVSHEDPEVKFNWYVDGVEVHNAKTKPREEQYNSTYRVVSVLTVLHQDWLNGKEYKCKVSNKALPAPIEKTISKAKGQPREPQVYTLPPSREEMTKNQVSLTCLVKGFYPSDIAVEWESNGQPENNYKTTPPVLDSDGSFFLYSKLTVDKSRWQQGNVFSCSVMHEALHNHYTQKSLSLSPG

SEQ ID NO: 1196 - protein, 214 aa, Artificial Sequence
  20H5.A3-hIgG4 (S228P) light chain peptide sequence
DIQMTQTTSSLSASLGDRVTINCSASQDISNYLNWYQQKPDGTVKLLIYYTSSLLSGVPSRFSGSGSGTDYSLTISNLEPEDIATYFCQQYSKLPYTFGSGTHLEIKRTVAAPSVFIFPPSDEQLKSGTASVVCLLNNFYPREAKVQWKVDNALQSGNSQESVTEQDSKDSTYSLSSTLTLSKADYEKHKVYACEVTHQGLSSPVTKSFNRGEC

SEQ ID NO: 1197 - protein, 214 aa, Artificial Sequence
  20H5.A3-hIgG4 (S28P)-mv2 light chain peptide sequence
DIQMTQTTSSLSASLGDRVTINCSASQDISNYLNWYQQKPDGTVKLLIYYTSSLLSGVPSRFSGSGSGTDYSLTISNLEPEDIATYFCQQYSKLPYTFGSGTKLEIKRTVAAPSVFIFPPSDEQLKSGTASVVCLLNNFYPREAKVQWKVDNALQSGNSQESVTEQDSKDSTYSLSSTLTLSKADYEKHKVYACEVTHQGLSSPVTKSFNRGEC

SEQ ID NO: 1198 - protein, 214 aa, Artificial Sequence
  798-9.20H5.A3-mH0mL1 light chain peptide sequence
DIQMTQTTSSLSASLGDRVTISCSASQDISNYLNWYQQKPDGTVKLLIYYTSSLLSGVPSRFSGSGSGTDYSLTISNLEPEDIATYFCQQYSKLPYTFGSGTHLEIKRTVAAPSVFIFPPSDEQLKSGTASVVCLLNNFYPREAKVQWKVDNALQSGNSQESVTEQDSKDSTYSLSSTLTLSKADYEKHKVYACEVTHQGLSSPVTKSFNRGEC

SEQ ID NO: 1199 - protein, 214 aa, Artificial Sequence; identical to SEQ ID NO: 1196
  798-9.20H5.A3-mH1mL0 light chain peptide sequence

SEQ ID NO: 1200 - protein, 214 aa, Artificial Sequence; identical to SEQ ID NO: 1198
  798-9.20H5.A3-mH1mL1 light chain peptide sequence

SEQ ID NO: 1201 - protein, 214 aa, Artificial Sequence; identical to SEQ ID NO: 1196
  798-9.20H5.A3-mH2mL0 light chain peptide sequence

SEQ ID NO: 1202 - protein, 214 aa, Artificial Sequence; identical to SEQ ID NO: 1198
  798-9.20H5.A3-mH2mL1 light chain peptide sequence

SEQ ID NO: 1203 - protein, 214 aa, Artificial Sequence; identical to SEQ ID NO: 859
  20H5.A3-VH1VL1 light chain peptide sequence

SEQ ID NO: 1204 - protein, 214 aa, Artificial Sequence
  20H5.A3-VH1VL2 light chain peptide sequence
DIQMTQSPSSLSASVGDRVTITCSASQDISNYLNWYQQKPGKAPKLLIYYTSSLLTGVPSRFSGSGSGTDYTFTISSLQPEDIATYFCQQYSKLPYTFGQGTKLEIKRTVAAPSVFIFPPSDEQLKSGTASVVCLLNNFYPREAKVQWKVDNALQSGNSQESVTEQDSKDSTYSLSSTLTLSKADYEKHKVYACEVTHQGLSSPVTKSFNRGEC

SEQ ID NO: 1205 - protein, 214 aa, Artificial Sequence; identical to SEQ ID NO: 860
  20H5.A3-VH1VL3 light chain peptide sequence

SEQ ID NO: 1206 - protein, 214 aa, Artificial Sequence
  20H5.A3-VH1VL4 light chain peptide sequence
DIQMTQSPSSLSASVGDRVTITCSASQDISNYLNWYQQKPGKAPKLLIYYTSSLLSGVPSRFSGSGSGTDYTLTISSLQPEDFATYFCQQYSKLPYTFGQGTKLEIKRTVAAPSVFIFPPSDEQLKSGTASVVCLLNNFYPREAKVQWKVDNALQSGNSQESVTEQDSKDSTYSLSSTLTLSKADYEKHKVYACEVTHQGLSSPVTKSFNRGEC

SEQ ID NO: 1207 - protein, 214 aa, Artificial Sequence
  20H5.A3-VH1VL5 light chain peptide sequence
DIQMTQSPSSLSASVGDRVTINCSASQDISNYLNWYQQKPGKAPKLLIYYTSSLLTGVPSRFSGSGSGTDYTFTISSLQPEDIATYFCQQYSKLPYTFGQGTKLEIKRTVAAPSVFIFPPSDEQLKSGTASVVCLLNNFYPREAKVQWKVDNALQSGNSQESVTEQDSKDSTYSLSSTLTLSKADYEKHKVYACEVTHQGLSSPVTKSFNRGEC

SEQ ID NO: 1208 - protein, 214 aa, Artificial Sequence
  20H5.A3-VH1VL6 light chain peptide sequence
DIQMTQSPSSLSASVGDRVTINCSASQDISNYLNWYQQKPGKAPKLLIYYTSSLLSGVPSRFSGSGSGTDYTLTISSLQPEDFATYFCQQYSKLPYTFGQGTKLEIKRTVAAPSVFIFPPSDEQLKSGTASVVCLLNNFYPREAKVQWKVDNALQSGNSQESVTEQDSKDSTYSLSSTLTLSKADYEKHKVYACEVTHQGLSSPVTKSFNRGEC

SEQ ID NO: 1209 - protein, 214 aa, Artificial Sequence; identical to SEQ ID NO: 860
  20H5.A3-VH2VL3 light chain peptide sequence

SEQ ID NO: 1210 - protein, 214 aa, Artificial Sequence; identical to SEQ ID NO: 1206
  20H5.A3-VH2VL4 light chain peptide sequence

SEQ ID NO: 1211 - protein, 214 aa, Artificial Sequence; identical to SEQ ID NO: 1207
  20H5.A3-VH2VL5 light chain peptide sequence

SEQ ID NO: 1212 - protein, 214 aa, Artificial Sequence; identical to SEQ ID NO: 1208
  20H5.A3-VH2VL6 light chain peptide sequence

SEQ ID NO: 1213 - protein, 214 aa, Artificial Sequence; identical to SEQ ID NO: 1207
  20H5.A3-VH3VL5 light chain peptide sequence

SEQ ID NO: 1214 - protein, 214 aa, Artificial Sequence; identical to SEQ ID NO: 1208
  20H5.A3-VH3VL6 light chain peptide sequence

SEQ ID NO: 1215 - protein, 214 aa, Artificial Sequence; identical to SEQ ID NO: 860
  20H5.A3-VH4VL3 light chain peptide sequence

SEQ ID NO: 1216 - protein, 214 aa, Artificial Sequence; identical to SEQ ID NO: 1206
  20H5.A3-VH4VL4 light chain peptide sequence

SEQ ID NO: 1217 - protein, 214 aa, Artificial Sequence; identical to SEQ ID NO: 1207
  20H5.A3-VH4VL5 light chain peptide sequence

SEQ ID NO: 1218 - protein, 214 aa, Artificial Sequence; identical to SEQ ID NO: 1208
  20H5.A3-VH4VL6 light chain peptide sequence

SEQ ID NO: 1219 - protein, 214 aa, Artificial Sequence; identical to SEQ ID NO: 1207
  20H5.A3-VH5VL5 light chain peptide sequence

SEQ ID NO: 1220 - protein, 214 aa, Artificial Sequence; identical to SEQ ID NO: 1208
  20H5.A3-VH5VL6 light chain peptide sequence

SEQ ID NO: 1221 - protein, 214 aa, Artificial Sequence; identical to SEQ ID NO: 1206
  20H5.A3-VH6VL4 light chain peptide sequence

SEQ ID NO: 1222 - protein, 214 aa, Artificial Sequence; identical to SEQ ID NO: 1207
  20H5.A3-VH6VL5 light chain peptide sequence

SEQ ID NO: 1223 - protein, 214 aa, Artificial Sequence; identical to SEQ ID NO: 1208
  20H5.A3-VH6VL6 light chain peptide sequence

SEQ ID NO: 1224 - protein, 214 aa, Artificial Sequence; identical to SEQ ID NO: 859
  20H5.A3-VH7VL1 light chain peptide sequence

SEQ ID NO: 1225 - protein, 214 aa, Artificial Sequence; identical to SEQ ID NO: 1204
  20H5.A3-VH7VL2 light chain peptide sequence

SEQ ID NO: 1226 - protein, 214 aa, Artificial Sequence; identical to SEQ ID NO: 860
  20H5.A3-VH7VL3 light chain peptide sequence

SEQ ID NO: 1227 - protein, 214 aa, Artificial Sequence; identical to SEQ ID NO: 1206
  20H5.A3-VH7VL4 light chain peptide sequence

SEQ ID NO: 1228 - protein, 214 aa, Artificial Sequence; identical to SEQ ID NO: 1207
  20H5.A3-VH7VL5 light chain peptide sequence

SEQ ID NO: 1229 - protein, 214 aa, Artificial Sequence; identical to SEQ ID NO: 1208
  20H5.A3-VH7VL6 light chain peptide sequence

SEQ ID NO: 1230 - protein, 214 aa, Artificial Sequence; identical to SEQ ID NO: 859
  20H5.A3_hVH3VL1-hIgG1 (KEMv2) light chain peptide sequence

SEQ ID NO: 1231 - protein, 214 aa, Artificial Sequence; identical to SEQ ID NO: 859
  20H5.A3_hVH3VL1-hIgG1 (LALAPGv2) light chain peptide sequence

SEQ ID NO: 1232 - protein, 214 aa, Artificial Sequence; identical to SEQ ID NO: 859
  20H5.A3_hVH3VL1-hIgG1 (REM) light chain peptide sequence

SEQ ID NO: 1233 - protein, 214 aa, Artificial Sequence; identical to SEQ ID NO: 859
  20H5.A3_hVH5VL1-hIgG1 (KEMv2) light chain peptide sequence

SEQ ID NO: 1234 - protein, 214 aa, Artificial Sequence; identical to SEQ ID NO: 859
  20H5.A3_hVH5VL1-hIgG1 (LALAPGv2) light chain peptide sequence

SEQ ID NO: 1235 - protein, 214 aa, Artificial Sequence; identical to SEQ ID NO: 859
  20H5.A3_hVH5VL1-hIgG1 (REM) light chain peptide sequence

SEQ ID NO: 1236 - protein, 214 aa, Artificial Sequence; identical to SEQ ID NO: 859
  20H5.A3_hVH6VL1-hIgG1 (KEMv2) light chain peptide sequence

SEQ ID NO: 1237 - protein, 214 aa, Artificial Sequence; identical to SEQ ID NO: 859
  20H5.A3_hVH6VL1-hIgG1 (LALAPGv2) light chain peptide sequence

SEQ ID NO: 1238 - protein, 214 aa, Artificial Sequence; identical to SEQ ID NO: 859
  20H5.A3_hVH6VL1-hIgG1 (REM) light chain peptide sequence

SEQ ID NO: 1239 - DNA, 348 bp, Artificial Sequence; identical to SEQ ID NO: 547
  20H5.A3-hIgG4 (S228P) VH DNA sequence

SEQ ID NO: 1240 - DNA, 348 bp, Artificial Sequence; identical to SEQ ID NO: 547
  20H5.A3-hIgG4 (S28P)-mv2 VH DNA sequence

SEQ ID NO: 1241 - DNA, 348 bp, Artificial Sequence; identical to SEQ ID NO: 547
  798-9.20H5.A3-mH0mL1 VH DNA sequence

SEQ ID NO: 1242 - DNA, 348 bp, Artificial Sequence
  798-9.20H5.A3-mH1mL0 VH DNA sequence
cagatccagttggtacagtctggacctgagctgaagaagcctggagagtcagtcaagatctcctgcaaggcttctggttatgccttcacaacctatggaatgagctgggtgcaacaggctccaggaaagggtttaaagtggatgggctgggtaaacacctactctggagtgccaacatatgctgatgacttcaagggacggtttgccttctctttggaaacctctgccagcactgcctatttgcagatcaacaacctcagaaatgaggacacggctacatatttctgtgcaagagggccctatgctatggactactggggtcaaggaacctcagtcaccgtctcctca

SEQ ID NO: 1243 - DNA, 348 bp, Artificial Sequence; identical to SEQ ID NO: 1242
  798-9.20H5.A3-mH1mL1 VH DNA sequence

SEQ ID NO: 1244 - DNA, 348 bp, Artificial Sequence
  798-9.20H5.A3-mH2mL0 VH DNA sequence
cagatccagttggtacagtctggacctgagctgaagaagcctggagagtcagtcaagatctcctgcaaggcttctggttatgccttcacaacctatggaatgagctgggtgcaacaggctccaggaaagggtttaaagtggatgggctgggtaaacacctactctggagtgccaacaagtgctgatgacttcaagggacggtttgccttctctttggaaacctctgccagcactgcctatttgcagatcaacaacctcagaaatgaggacacggctacatatttctgtgcaagagggccctatgctatggactactggggtcaaggaacctcagtcaccgtctcctca

SEQ ID NO: 1245 - DNA, 348 bp, Artificial Sequence; identical to SEQ ID NO: 1244
  798-9.20H5.A3-mH2mL1 VH DNA sequence

SEQ ID NO: 1246 - DNA, 348 bp, Artificial Sequence
  20H5.A3-VH1VL1 VH DNA sequence
caggtgcagctcgtccagtctggctccgagttgaagaaacccggcgcctctgtgaaagtttcctgcaaagccagtggatatgcctttaccacgtacgggatgtcctgggttcgccaggcccccggacaggggttggagtggatgggctgggtgaacacatattctggagtaccaacctatgctcagggattcaccgggcggtttgttttcagcctcgatacaagtgttagcacagcctacctgcagatctcttcccttaaggccgaggatactgcagtgtactactgtgcccgtgggccgtacgcaatggactactggggccagggaacccttgtgactgtgagctct

SEQ ID NO: 1247 - DNA, 348 bp, Artificial Sequence; identical to SEQ ID NO: 1246
  20H5.A3-VH1VL2 VH DNA sequence

SEQ ID NO: 1248 - DNA, 348 bp, Artificial Sequence; identical to SEQ ID NO: 1246
  20H5.A3-VH1VL3 VH DNA sequence

SEQ ID NO: 1249 - DNA, 348 bp, Artificial Sequence; identical to SEQ ID NO: 1246
  20H5.A3-VH1VL4 VH DNA sequence

SEQ ID NO: 1250 - DNA, 348 bp, Artificial Sequence; identical to SEQ ID NO: 1246
  20H5.A3-VH1VL5 VH DNA sequence

SEQ ID NO: 1251 - DNA, 348 bp, Artificial Sequence; identical to SEQ ID NO: 1246
  20H5.A3-VH1VL6 VH DNA sequence

SEQ ID NO: 1252 - DNA, 348 bp, Artificial Sequence
  20H5.A3-VH2VL3 VH DNA sequence
caagtgcagctagtgcagagtggctccgaactgaagaagccaggcgcttcagtgaaggtaagttgcaaggctagcggttacgcttttacaacctacggcatgtcatgggtgagacaagccccaggacaggggctagaatggatgggctgggttaacacatacagtggcgtgcccacttccgcccagggctttaccggccgtttcgttttcagtctggataccagcgtctctaccgcatacctccaaattagttctttgaaggcagaggataccgctgtttactattgcgccaggggcccgtacgctatggactactggggccaggggacactggtcaccgtcagcagt

SEQ ID NO: 1253 - DNA, 348 bp, Artificial Sequence; identical to SEQ ID NO: 1252
  20H5.A3-VH2VL4 VH DNA sequence

SEQ ID NO: 1254 - DNA, 348 bp, Artificial Sequence; identical to SEQ ID NO: 1252
  20H5.A3-VH2VL5 VH DNA sequence

SEQ ID NO: 1255 - DNA, 348 bp, Artificial Sequence; identical to SEQ ID NO: 1252
  20H5.A3-VH2VL6 VH DNA sequence

SEQ ID NO: 1256 - DNA, 348 bp, Artificial Sequence; identical to SEQ ID NO: 874
  20H5.A3-VH3VL5 VH DNA sequence

SEQ ID NO: 1257 - DNA, 348 bp, Artificial Sequence; identical to SEQ ID NO: 874
  20H5.A3-VH3VL6 VH DNA sequence

SEQ ID NO: 1258 - DNA, 348 bp, Artificial Sequence; identical to SEQ ID NO: 876
  20H5.A3-VH4VL3 VH DNA sequence

SEQ ID NO: 1259 - DNA, 348 bp, Artificial Sequence; identical to SEQ ID NO: 876
  20H5.A3-VH4VL4 VH DNA sequence

SEQ ID NO: 1260 - DNA, 348 bp, Artificial Sequence; identical to SEQ ID NO: 876
  20H5.A3-VH4VL5 VH DNA sequence

SEQ ID NO: 1261 - DNA, 348 bp, Artificial Sequence; identical to SEQ ID NO: 876
  20H5.A3-VH4VL6 VH DNA sequence

SEQ ID NO: 1262 - DNA, 348 bp, Artificial Sequence; identical to SEQ ID NO: 877
  20H5.A3-VH5VL5 VH DNA sequence

SEQ ID NO: 1263 - DNA, 348 bp, Artificial Sequence; identical to SEQ ID NO: 877
  20H5.A3-VH5VL6 VH DNA sequence

SEQ ID NO: 1264 - DNA, 348 bp, Artificial Sequence; identical to SEQ ID NO: 879
  20H5.A3-VH6VL4 VH DNA sequence

SEQ ID NO: 1265 - DNA, 348 bp, Artificial Sequence; identical to SEQ ID NO: 879
  20H5.A3-VH6VL5 VH DNA sequence

SEQ ID NO: 1266 - DNA, 348 bp, Artificial Sequence; identical to SEQ ID NO: 879
  20H5.A3-VH6VL6 VH DNA sequence

SEQ ID NO: 1267 - DNA, 348 bp, Artificial Sequence
  20H5.A3-VH7VL1 VH DNA sequence
cagattcagcttgtacagagtgggttcgaactgaagaagcccggggcctctgttaagatcagttgtaaagccagtggctacgccttcactacctacggaatgtcttgggtacggcaagcccccggacaagggctggaatggatgggctgggtaaacacatatagtggagtgcccacatatgccgatgcctttacaggccggttcgtattctctctggacacttccgtttctactgcctacctgcaaatctcttctctgaaggcagaagacacagctgtttacttttgtgctaggggtccctatgctatggattattgggggcagggcacactagtcacagtctcctca

SEQ ID NO: 1268 - DNA, 348 bp, Artificial Sequence; identical to SEQ ID NO: 1267
  20H5.A3-VH7VL2 VH DNA sequence

SEQ ID NO: 1269 - DNA, 348 bp, Artificial Sequence; identical to SEQ ID NO: 1267
  20H5.A3-VH7VL3 VH DNA sequence

SEQ ID NO: 1270 - DNA, 348 bp, Artificial Sequence; identical to SEQ ID NO: 1267
  20H5.A3-VH7VL4 VH DNA sequence

SEQ ID NO: 1271 - DNA, 348 bp, Artificial Sequence; identical to SEQ ID NO: 1267
  20H5.A3-VH7VL5 VH DNA sequence

SEQ ID NO: 1272 - DNA, 348 bp, Artificial Sequence; identical to SEQ ID NO: 1267
  20H5.A3-VH7VL6 VH DNA sequence

SEQ ID NO: 1273 - DNA, 348 bp, Artificial Sequence; identical to SEQ ID NO: 874
  20H5.A3_hVH3VL1-hIgG1 (KEMv2) VH DNA sequence

SEQ ID NO: 1274 - DNA, 348 bp, Artificial Sequence; identical to SEQ ID NO: 874
  20H5.A3_hVH3VL1-hIgG1 (LALAPGv2) VH DNA sequence

SEQ ID NO: 1275 - DNA, 348 bp, Artificial Sequence; identical to SEQ ID NO: 874
  20H5.A3_hVH3VL1-hIgG1 (REM) VH DNA sequence

SEQ ID NO: 1276 - DNA, 348 bp, Artificial Sequence; identical to SEQ ID NO: 877
  20H5.A3_hVH5VL1-hIgG1 (KEMv2) VH DNA sequence

SEQ ID NO: 1277 - DNA, 348 bp, Artificial Sequence; identical to SEQ ID NO: 877
  20H5.A3_hVH5VL1-hIgG1 (LALAPGv2) VH DNA sequence

SEQ ID NO: 1278 - DNA, 348 bp, Artificial Sequence; identical to SEQ ID NO: 877
  20H5.A3_hVH5VL1-hIgG1 (REM) VH DNA sequence

SEQ ID NO: 1279 - DNA, 348 bp, Artificial Sequence; identical to SEQ ID NO: 879
  20H5.A3_hVH6VL1-hIgG1 (KEMv2) VH DNA sequence

SEQ ID NO: 1280 - DNA, 348 bp, Artificial Sequence; identical to SEQ ID NO: 879
  20H5.A3_hVH6VL1-hIgG1 (LALAPGv2) VH DNA sequence

SEQ ID NO: 1281 - DNA, 348 bp, Artificial Sequence; identical to SEQ ID NO: 879
  20H5.A3_hVH6VL1-hIgG1 (REM) VH DNA sequence

SEQ ID NO: 1282 - DNA, 321 bp, Artificial Sequence; identical to SEQ ID NO: 629
  20H5.A3-hIgG4 (S228P) VL DNA sequence

SEQ ID NO: 1283 - DNA, 321 bp, Artificial Sequence
  20H5.A3-hIgG4 (S28P)-mv2 VL DNA sequence
gatatccagatgacacagactacatcctccctgtctgcctctctgggagacagagtcaccatcaattgcagtgcaagtcaggacattagcaattatttaaactggtatcagcagaaaccagatggaactgttaaactcctgatctattacacatcaagtttactctcaggagtcccatcaaggttcagtggcagtgggtctgggacagattattctctcaccatcagcaacctggaacctgaagatattgccacttacttttgtcagcaatatagtaagcttccctatacgttcggatcggggaccaaactggaaataaaa

SEQ ID NO: 1284 - DNA, 321 bp, Artificial Sequence
  798-9.20H5.A3-mH0mL1 VL DNA sequence
gatatccagatgacacagactacatcctccctgtctgcctctctgggagacagagtcaccatcagttgcagtgcaagtcaggacattagcaattatttaaactggtatcagcagaaaccagatggaactgttaaactcctgatctattacacatcaagtttactctcaggagtcccatcaaggttcagtggcagtgggtctgggacagattattctctcaccatcagcaacctggaacctgaagatattgccacttacttttgtcagcaatatagtaagcttccctatacgttcggatcggggacccacctggaaataaaa

SEQ ID NO: 1285 - DNA, 321 bp, Artificial Sequence
  798-9.20H5.A3-mH1mL0 VL DNA sequence
gatatccagatgacccagaccacaagctctctgtccgctagccttggagacagagtgaccatcaactgcagtgcaagccaggatatctccaactacctgaattggtaccagcagaagcctgacggtacggtgaaacttctaatatactacacttcatctctgctgtctggggtgcccagtaggttcagcggtagcggttcagggactgattattcacttacgatatcaaacctggaacccgaggacattgccacttacttctgccagcagtacagtaagttgccttatacattcggtagtggaactcaccttgagattaaa

SEQ ID NO: 1286 - DNA, 321 bp, Artificial Sequence; identical to SEQ ID NO: 1284
  798-9.20H5.A3-mH1mL1 VL DNA sequence

SEQ ID NO: 1287 - DNA, 321 bp, Artificial Sequence; identical to SEQ ID NO: 1285
  798-9.20H5.A3-mH2mL0 VL DNA sequence

SEQ ID NO: 1288 - DNA, 321 bp, Artificial Sequence; identical to SEQ ID NO: 1284
  798-9.20H5.A3-mH2mL1 VL DNA sequence

SEQ ID NO: 1289 - DNA, 321 bp, Artificial Sequence; identical to SEQ ID NO: 889
  20H5.A3-VH1VL1 VL DNA sequence

SEQ ID NO: 1290 - DNA, 321 bp, Artificial Sequence
  20H5.A3-VH1VL2 VL DNA sequence
gacatccaaatgacacagagtcccagttcccttagtgcctccgtgggggaccgtgttactatcacatgctcagctagccaagacatatccaattacctaaattggtatcagcagaagcctggcaaagcacctaagctcctgatttattacacctcatccctgttgacgggggttcccagccggtttagcggtagtgggtcaggaacagactacaccttcactataagcagcctgcaacccgaggatattgctacttatttttgtcagcagtattccaagctgccttacacattcggtcagggcacaaagctggaaattaag

SEQ ID NO: 1291 - DNA, 321 bp, Artificial Sequence; identical to SEQ ID NO: 890
  20H5.A3-VH1VL3 VL DNA sequence

SEQ ID NO: 1292 - DNA, 321 bp, Artificial Sequence
  20H5.A3-VH1VL4 VL DNA sequence
gacattcaaatgacacagagcccctctagtttgtcagccagtgtcggagaccgggtgactattacatgctcagccagtcaagacatcagcaactatctaaattggtatcagcagaaacccgggaaggctcctaagctgctgatttattacacatctagcttgctgagcggggtcccgagtagattcagtggatccggttctgggacagactataccctcaccatctcatccctgcaaccagaggacttcgctacttacttctgccagcagtatagcaaacttccctacacatttggacaggggacaaaactggagattaaa

SEQ ID NO: 1293 - DNA, 321 bp, Artificial Sequence
  20H5.A3-VH1VL5 VL DNA sequence
gacatccaaatgacacagagtcccagttcccttagtgcctccgtgggggaccgtgttactatcaactgctcagctagccaagacatatccaattacctaaattggtatcagcagaagcctggcaaagcacctaagctcctgatttattacacctcatccctgttgacgggggttcccagccggtttagcggtagtgggtcaggaacagactacaccttcactataagcagcctgcaacccgaggatattgctacttatttttgtcagcagtattccaagctgccttacacattcggtcagggcacaaagctggaaattaag

SEQ ID NO: 1294 - DNA, 321 bp, Artificial Sequence
  20H5.A3-VH1VL6 VL DNA sequence
gacattcaaatgacacagagcccctctagtttgtcagccagtgtcggagaccgggtgactattaactgctcagccagtcaagacatcagcaactatctaaattggtatcagcagaaacccgggaaggctcctaagctgctgatttattacacatctagcttgctgagcggggtcccgagtagattcagtggatccggttctgggacagactataccctcaccatctcatccctgcaaccagaggacttcgctacttacttctgccagcagtatagcaaacttccctacacatttggacaggggacaaaactggagattaaa

SEQ ID NO: 1295 - DNA, 321 bp, Artificial Sequence; identical to SEQ ID NO: 890
  20H5.A3-VH2VL3 VL DNA sequence

SEQ ID NO: 1296 - DNA, 321 bp, Artificial Sequence; identical to SEQ ID NO: 1292
  20H5.A3-VH2VL4 VL DNA sequence

SEQ ID NO: 1297 - DNA, 321 bp, Artificial Sequence; identical to SEQ ID NO: 1293
  20H5.A3-VH2VL5 VL DNA sequence

SEQ ID NO: 1298 - DNA, 321 bp, Artificial Sequence; identical to SEQ ID NO: 1294
  20H5.A3-VH2VL6 VL DNA sequence

SEQ ID NO: 1299 - DNA, 321 bp, Artificial Sequence; identical to SEQ ID NO: 1293
  20H5.A3-VH3VL5 VL DNA sequence

SEQ ID NO: 1300 - DNA, 321 bp, Artificial Sequence; identical to SEQ ID NO: 1294
  20H5.A3-VH3VL6 VL DNA sequence

SEQ ID NO: 1301 - DNA, 321 bp, Artificial Sequence; identical to SEQ ID NO: 890
  20H5.A3-VH4VL3 VL DNA sequence

SEQ ID NO: 1302 - DNA, 321 bp, Artificial Sequence; identical to SEQ ID NO: 1292
  20H5.A3-VH4VL4 VL DNA sequence

SEQ ID NO: 1303 - DNA, 321 bp, Artificial Sequence; identical to SEQ ID NO: 1293
  20H5.A3-VH4VL5 VL DNA sequence

SEQ ID NO: 1304 - DNA, 321 bp, Artificial Sequence; identical to SEQ ID NO: 1294
  20H5.A3-VH4VL6 VL DNA sequence

SEQ ID NO: 1305 - DNA, 321 bp, Artificial Sequence; identical to SEQ ID NO: 1293
  20H5.A3-VH5VL5 VL DNA sequence

SEQ ID NO: 1306 - DNA, 321 bp, Artificial Sequence; identical to SEQ ID NO: 1294
  20H5.A3-VH5VL6 VL DNA sequence

SEQ ID NO: 1307 - DNA, 321 bp, Artificial Sequence; identical to SEQ ID NO: 1292
  20H5.A3-VH6VL4 VL DNA sequence

SEQ ID NO: 1308 - DNA, 321 bp, Artificial Sequence; identical to SEQ ID NO: 1293
  20H5.A3-VH6VL5 VL DNA sequence

SEQ ID NO: 1309 - DNA, 321 bp, Artificial Sequence; identical to SEQ ID NO: 1292
  20H5.A3-VH6VL6 VL DNA sequence

SEQ ID NO: 1310 - DNA, 321 bp, Artificial Sequence; identical to SEQ ID NO: 889
  20H5.A3-VH7VL1 VL DNA sequence

SEQ ID NO: 1311 - DNA, 321 bp, Artificial Sequence; identical to SEQ ID NO: 1290
  20H5.A3-VH7VL2 VL DNA sequence

SEQ ID NO: 1312 - DNA, 321 bp, Artificial Sequence; identical to SEQ ID NO: 890
  20H5.A3-VH7VL3 VL DNA sequence

SEQ ID NO: 1313 - DNA, 321 bp, Artificial Sequence; identical to SEQ ID NO: 1292
  20H5.A3-VH7VL4 VL DNA sequence

SEQ ID NO: 1314 - DNA, 321 bp, Artificial Sequence; identical to SEQ ID NO: 1293
  20H5.A3-VH7VL5 VL DNA sequence

SEQ ID NO: 1315 - DNA, 321 bp, Artificial Sequence; identical to SEQ ID NO: 1293
  20H5.A3-VH7VL6 VL DNA sequence

SEQ ID NO: 1316 - DNA, 321 bp, Artificial Sequence; identical to SEQ ID NO: 889
  20H5.A3_hVH3VL1-hIgG1 (KEMv2) VL DNA sequence

SEQ ID NO: 1317 - DNA, 321 bp, Artificial Sequence; identical to SEQ ID NO: 889
  20H5.A3_hVH3VL1-hIgG1 (LALAPGv2) VL DNA sequence

SEQ ID NO: 1318 - DNA, 321 bp, Artificial Sequence; identical to SEQ ID NO: 889
  20H5.A3_hVH3VL1-hIgG1 (REM) VL DNA sequence

SEQ ID NO: 1319 - DNA, 321 bp, Artificial Sequence; identical to SEQ ID NO: 889
  20H5.A3_hVH5VL1-hIgG1 (KEMv2) VL DNA sequence

SEQ ID NO: 1320 - DNA, 321 bp, Artificial Sequence; identical to SEQ ID NO: 889
  20H5.A3_hVH5VL1-hIgG1 (LALAPGv2) VL DNA sequence

SEQ ID NO: 1321 - DNA, 321 bp, Artificial Sequence; identical to SEQ ID NO: 889
  20H5.A3_hVH5VL1-hIgG1 (REM) VL DNA sequence

SEQ ID NO: 1322 - DNA, 321 bp, Artificial Sequence; identical to SEQ ID NO: 889
  20H5.A3_hVH6VL1-hIgG1 (KEMv2) VL DNA sequence

SEQ ID NO: 1323 - DNA, 321 bp, Artificial Sequence; identical to SEQ ID NO: 889
  20H5.A3_hVH6VL1-hIgG1 (LALAPGv2) VL DNA sequence

SEQ ID NO: 1324 - DNA, 321 bp, Artificial Sequence; identical to SEQ ID NO: 889
  20H5.A3_hVH6VL1-hIgG1 (REM) VL DNA sequence

SEQ ID NO: 1325 - DNA, 1332 bp, Artificial Sequence
  20H5.A3-hIgG4 (S228P) heavy chain DNA sequence
cagatccagttggtacagtctggacctgagctgaagaagcctggagagtcagtcaagatctcctgcaaggcttctggttatgccttcacaacctatggaatgagctgggtgcaacaggctccaggaaagggtttaaagtggatgggctgggtaaacacctactctggagtgccaacatgtgctgatgacttcaagggacggtttgccttctctttggaaacctctgccagcactgcctatttgcagatcaacaacctcagaaatgaggacacggctacatatttctgtgcaagagggccctatgctatggactactggggtcaaggaacctcagtcaccgtctcctcagctagcaccaagggccccagcgtgtttcctctcgctccctgcagccggagcacatccgagagcaccgctgctctgggctgtctcgtgaaggactacttccctgaacccgtcaccgtcagctggaatagcggcgccctgacatccggcgtccacacattccccgctgtcctgcagagcagcggcctgtacagcctgagctccgtggtcaccgtgcctagcagcagcctgggaacaaagacctacacctgcaacgtggaccataagccctccaacaccaaggtggacaagcgggtggaatccaagtatggacccccctgtcctccttgccctgctcctgaatttctcggaggcccctccgtcttcctgtttccccccaagcccaaggacaccctgatgatctcccggacacccgaagtcacctgcgtcgtggtggatgtcagccaggaagatcccgaggtgcagttcaactggtacgtggacggagtggaggtgcataacgccaaaaccaagcccagggaagagcagttcaacagcacctatcgggtcgtgtccgtgctcaccgtcctgcatcaggattggctcaacggcaaggagtacaagtgcaaggtgtccaacaagggcctgccctcctccatcgagaagaccatctccaaggctaagggccaacctcgggagccccaagtgtataccctccctcccagccaggaggagatgaccaagaatcaagtgagcctgacctgcctcgtgaagggattttacccctccgacatcgctgtggaatgggaaagcaatggccaacctgagaacaactacaagaccacaccccccgtgctggactccgatggctccttcttcctgtacagcaggctgaccgtggacaaatcccggtggcaagagggaaacgtgttcagctgctccgtgatgcacgaggctctccacaaccactacacccagaagagcctctccctgagcctcggctagtaa

SEQ ID NO: 1326 - DNA, 1332 bp, Artificial Sequence; identical to SEQ ID NO: 1325
  20H5.A3-hIgG4 (S28P)-mv2 heavy chain DNA sequence

SEQ ID NO: 1327 - DNA, 1332 bp, Artificial Sequence; identical to SEQ ID NO: 1325
  798-9.20H5.A3-mH0mL1 heavy chain DNA sequence

SEQ ID NO: 1328 - DNA, 1332 bp, Artificial Sequence
  798-9.20H5.A3-mH1mL0 heavy chain DNA sequence
cagatccagttggtacagtctggacctgagctgaagaagcctggagagtcagtcaagatctcctgcaaggcttctggttatgccttcacaacctatggaatgagctgggtgcaacaggctccaggaaagggtttaaagtggatgggctgggtaaacacctactctggagtgccaacatatgctgatgacttcaagggacggtttgccttctctttggaaacctctgccagcactgcctatttgcagatcaacaacctcagaaatgaggacacggctacatatttctgtgcaagagggccctatgctatggactactggggtcaaggaacctcagtcaccgtctcctcagctagcaccaagggccccagcgtgtttcctctcgctccctgcagccggagcacatccgagagcaccgctgctctgggctgtctcgtgaaggactacttccctgaacccgtcaccgtcagctggaatagcggcgccctgacatccggcgtccacacattccccgctgtcctgcagagcagcggcctgtacagcctgagctccgtggtcaccgtgcctagcagcagcctgggaacaaagacctacacctgcaacgtggaccataagccctccaacaccaaggtggacaagcgggtggaatccaagtatggacccccctgtcctccttgccctgctcctgaatttctcggaggcccctccgtcttcctgtttccccccaagcccaaggacaccctgatgatctcccggacacccgaagtcacctgcgtcgtggtggatgtcagccaggaagatcccgaggtgcagttcaactggtacgtggacggagtggaggtgcataacgccaaaaccaagcccagggaagagcagttcaacagcacctatcgggtcgtgtccgtgctcaccgtcctgcatcaggattggctcaacggcaaggagtacaagtgcaaggtgtccaacaagggcctgccctcctccatcgagaagaccatctccaaggctaagggccaacctcgggagccccaagtgtataccctccctcccagccaggaggagatgaccaagaatcaagtgagcctgacctgcctcgtgaagggattttacccctccgacatcgctgtggaatgggaaagcaatggccaacctgagaacaactacaagaccacaccccccgtgctggactccgatggctccttcttcctgtacagcaggctgaccgtggacaaatcccggtggcaagagggaaacgtgttcagctgctccgtgatgcacgaggctctccacaaccactacacccagaagagcctctccctgagcctcggctagtaa

SEQ ID NO: 1329 - DNA, 1332 bp, Artificial Sequence; identical to SEQ ID NO: 1328
  798-9.20H5.A3-mH1mL1 heavy chain DNA sequence

SEQ ID NO: 1330 - DNA, 1332 bp, Artificial Sequence
  798-9.20H5.A3-mH2mL0 heavy chain DNA sequence
cagatccagttggtacagtctggacctgagctgaagaagcctggagagtcagtcaagatctcctgcaaggcttctggttatgccttcacaacctatggaatgagctgggtgcaacaggctccaggaaagggtttaaagtggatgggctgggtaaacacctactctggagtgccaacaagtgctgatgacttcaagggacggtttgccttctctttggaaacctctgccagcactgcctatttgcagatcaacaacctcagaaatgaggacacggctacatatttctgtgcaagagggccctatgctatggactactggggtcaaggaacctcagtcaccgtctcctcagctagcaccaagggccccagcgtgtttcctctcgctccctgcagccggagcacatccgagagcaccgctgctctgggctgtctcgtgaaggactacttccctgaacccgtcaccgtcagctggaatagcggcgccctgacatccggcgtccacacattccccgctgtcctgcagagcagcggcctgtacagcctgagctccgtggtcaccgtgcctagcagcagcctgggaacaaagacctacacctgcaacgtggaccataagccctccaacaccaaggtggacaagcgggtggaatccaagtatggacccccctgtcctccttgccctgctcctgaatttctcggaggcccctccgtcttcctgtttccccccaagcccaaggacaccctgatgatctcccggacacccgaagtcacctgcgtcgtggtggatgtcagccaggaagatcccgaggtgcagttcaactggtacgtggacggagtggaggtgcataacgccaaaaccaagcccagggaagagcagttcaacagcacctatcgggtcgtgtccgtgctcaccgtcctgcatcaggattggctcaacggcaaggagtacaagtgcaaggtgtccaacaagggcctgccctcctccatcgagaagaccatctccaaggctaagggccaacctcgggagccccaagtgtataccctccctcccagccaggaggagatgaccaagaatcaagtgagcctgacctgcctcgtgaagggattttacccctccgacatcgctgtggaatgggaaagcaatggccaacctgagaacaactacaagaccacaccccccgtgctggactccgatggctccttcttcctgtacagcaggctgaccgtggacaaatcccggtggcaagagggaaacgtgttcagctgctccgtgatgcacgaggctctccacaaccactacacccagaagagcctctccctgagcctcggctagtaa

SEQ ID NO: 1331 - DNA, 1332 bp, Artificial Sequence; identical to SEQ ID NO: 1330
  798-9.20H5.A3-mH2mL1 heavy chain DNA sequence

SEQ ID NO: 1332 - DNA, 1329 bp, Artificial Sequence
  20H5.A3-VH1VL1 heavy chain DNA sequence
caggtgcagctcgtccagtctggctccgagttgaagaaacccggcgcctctgtgaaagtttcctgcaaagccagtggatatgcctttaccacgtacgggatgtcctgggttcgccaggcccccggacaggggttggagtggatgggctgggtgaacacatattctggagtaccaacctatgctcagggattcaccgggcggtttgttttcagcctcgatacaagtgttagcacagcctacctgcagatctcttcccttaaggccgaggatactgcagtgtactactgtgcccgtgggccgtacgcaatggactactggggccagggaacccttgtgactgtgagctctgctagcaccaagggccccagcgtgtttcctctcgctccctgcagccggagcacatccgagagcaccgctgctctgggctgtctcgtgaaggactacttccctgaacccgtcaccgtcagctggaatagcggcgccctgacatccggcgtccacacattccccgctgtcctgcagagcagcggcctgtacagcctgagctccgtggtcaccgtgcctagcagcagcctgggaacaaagacctacacctgcaacgtggaccataagccctccaacaccaaggtggacaagcgggtggaatccaagtatggacccccctgtcctccttgccctgctcctgaatttctcggaggcccctccgtcttcctgtttccccccaagcccaaggacaccctgatgatctcccggacacccgaagtcacctgcgtcgtggtggatgtcagccaggaagatcccgaggtgcagttcaactggtacgtggacggagtggaggtgcataacgccaaaaccaagcccagggaagagcagttcaacagcacctatcgggtcgtgtccgtgctcaccgtcctgcatcaggattggctcaacggcaaggagtacaagtgcaaggtgtccaacaagggcctgccctcctccatcgagaagaccatctccaaggctaagggccaacctcgggagccccaagtgtataccctccctcccagccaggaggagatgaccaagaatcaagtgagcctgacctgcctcgtgaagggattttacccctccgacatcgctgtggaatgggaaagcaatggccaacctgagaacaactacaagaccacaccccccgtgctggactccgatggctccttcttcctgtacagcaggctgaccgtggacaaatcccggtggcaagagggaaacgtgttcagctgctccgtgatgcacgaggctctccacaaccactacacccagaagagcctctccctgagcctcggctag

SEQ ID NO: 1333 - DNA, 1329 bp, Artificial Sequence; identical to SEQ ID NO: 1332
  20H5.A3-VH1VL2 heavy chain DNA sequence

SEQ ID NO: 1334 - DNA, 1329 bp, Artificial Sequence; identical to SEQ ID NO: 1332
  20H5.A3-VH1VL3 heavy chain DNA sequence

SEQ ID NO: 1335 - DNA, 1329 bp, Artificial Sequence; identical to SEQ ID NO: 1332
  20H5.A3-VH1VL4 heavy chain DNA sequence

SEQ ID NO: 1336 - DNA, 1329 bp, Artificial Sequence; identical to SEQ ID NO: 1332
  20H5.A3-VH1VL5 heavy chain DNA sequence

SEQ ID NO: 1337 - DNA, 1329 bp, Artificial Sequence; identical to SEQ ID NO: 1332
  20H5.A3-VH1VL6 heavy chain DNA sequence

SEQ ID NO: 1338 - DNA, 1326 bp, Artificial Sequence
  20H5.A3-VH2VL3 heavy chain DNA sequence
caagtgcagctagtgcagagtggctccgaactgaagaagccaggcgcttcagtgaaggtaagttgcaaggctagcggttacgcttttacaacctacggcatgtcatgggtgagacaagccccaggacaggggctagaatggatgggctgggttaacacatacagtggcgtgcccacttccgcccagggctttaccggccgtttcgttttcagtctggataccagcgtctctaccgcatacctccaaattagttctttgaaggcagaggataccgctgtttactattgcgccaggggcccgtacgctatggactactggggccaggggacactggtcaccgtcagcagtgctagcaccaagggccccagcgtgtttcctctcgctccctgcagccggagcacatccgagagcaccgctgctctgggctgtctcgtgaaggactacttccctgaacccgtcaccgtcagctggaatagcggcgccctgacatccggcgtccacacattccccgctgtcctgcagagcagcggcctgtacagcctgagctccgtggtcaccgtgcctagcagcagcctgggaacaaagacctacacctgcaacgtggaccataagccctccaacaccaaggtggacaagcgggtggaatccaagtatggacccccctgtcctccttgccctgctcctgaatttctcggaggcccctccgtcttcctgtttccccccaagcccaaggacaccctgatgatctcccggacacccgaagtcacctgcgtcgtggtggatgtcagccaggaagatcccgaggtgcagttcaactggtacgtggacggagtggaggtgcataacgccaaaaccaagcccagggaagagcagttcaacagcacctatcgggtcgtgtccgtgctcaccgtcctgcatcaggattggctcaacggcaaggagtacaagtgcaaggtgtccaacaagggcctgccctcctccatcgagaagaccatctccaaggctaagggccaacctcgggagccccaagtgtataccctccctcccagccaggaggagatgaccaagaatcaagtgagcctgacctgcctcgtgaagggattttacccctccgacatcgctgtggaatgggaaagcaatggccaacctgagaacaactacaagaccacaccccccgtgctggactccgatggctccttcttcctgtacagcaggctgaccgtggacaaatcccggtggcaagagggaaacgtgttcagctgctccgtgatgcacgaggctctccacaaccactacacccagaagagcctctccctgagcctcggc

SEQ ID NO: 1339 - DNA, 1326 bp, Artificial Sequence; identical to SEQ ID NO: 1338
  20H5.A3-VH2VL4 heavy chain DNA sequence

SEQ ID NO: 1340 - DNA, 1326 bp, Artificial Sequence; identical to SEQ ID NO: 1338
  20H5.A3-VH2VL5 heavy chain DNA sequence

SEQ ID NO: 1341 - DNA, 1326 bp, Artificial Sequence; identical to SEQ ID NO: 1338
  20H5.A3-VH2VL6 heavy chain DNA sequence

SEQ ID NO: 1342 - DNA, 1332 bp, Artificial Sequence; identical to SEQ ID NO: 904
  20H5.A3-VH3VL5 heavy chain DNA sequence

SEQ ID NO: 1343 - DNA, 1332 bp, Artificial Sequence; identical to SEQ ID NO: 904
  20H5.A3-VH3VL6 heavy chain DNA sequence

SEQ ID NO: 1344 - DNA, 1331 bp, Artificial Sequence; identical to SEQ ID NO: 906
  20H5.A3-VH4VL3 heavy chain DNA sequence

SEQ ID NO: 1345 - DNA, 1331 bp, Artificial Sequence; identical to SEQ ID NO: 906
  20H5.A3-VH4VL4 heavy chain DNA sequence

SEQ ID NO: 1346 - DNA, 1331 bp, Artificial Sequence; identical to SEQ ID NO: 906
  20H5.A3-VH4VL5 heavy chain DNA sequence

SEQ ID NO: 1347 - DNA, 1331 bp, Artificial Sequence; identical to SEQ ID NO: 906
  20H5.A3-VH4VL6 heavy chain DNA sequence

SEQ ID NO: 1348 - DNA, 1332 bp, Artificial Sequence; identical to SEQ ID NO: 907
  20H5.A3-VH5VL5 heavy chain DNA sequence

SEQ ID NO: 1349 - DNA, 1332 bp, Artificial Sequence; identical to SEQ ID NO: 907
  20H5.A3-VH5VL6 heavy chain DNA sequence

SEQ ID NO: 1350 - DNA, 1332 bp, Artificial Sequence; identical to SEQ ID NO: 909
  20H5.A3-VH6VL4 heavy chain DNA sequence

SEQ ID NO: 1351 - DNA, 1332 bp, Artificial Sequence; identical to SEQ ID NO: 909
  20H5.A3-VH6VL5 heavy chain DNA sequence

SEQ ID NO: 1352 - DNA, 1332 bp, Artificial Sequence; identical to SEQ ID NO: 909
  20H5.A3-VH6VL6 heavy chain DNA sequence

SEQ ID NO: 1353 - DNA, 1332 bp, Artificial Sequence
  20H5.A3-VH7VL1 heavy chain DNA sequence
cagattcagcttgtacagagtgggttcgaactgaagaagcccggggcctctgttaagatcagttgtaaagccagtggctacgccttcactacctacggaatgtcttgggtacggcaagcccccggacaagggctggaatggatgggctgggtaaacacatatagtggagtgcccacatatgccgatgcctttacaggccggttcgtattctctctggacacttccgtttctactgcctacctgcaaatctcttctctgaaggcagaagacacagctgtttacttttgtgctaggggtccctatgctatggattattgggggcagggcacactagtcacagtctcctcagctagcaccaagggccccagcgtgtttcctctcgctccctgcagccggagcacatccgagagcaccgctgctctgggctgtctcgtgaaggactacttccctgaacccgtcaccgtcagctggaatagcggcgccctgacatccggcgtccacacattccccgctgtcctgcagagcagcggcctgtacagcctgagctccgtggtcaccgtgcctagcagcagcctgggaacaaagacctacacctgcaacgtggaccataagccctccaacaccaaggtggacaagcgggtggaatccaagtatggacccccctgtcctccttgccctgctcctgaatttctcggaggcccctccgtcttcctgtttccccccaagcccaaggacaccctgatgatctcccggacacccgaagtcacctgcgtcgtggtggatgtcagccaggaagatcccgaggtgcagttcaactggtacgtggacggagtggaggtgcataacgccaaaaccaagcccagggaagagcagttcaacagcacctatcgggtcgtgtccgtgctcaccgtcctgcatcaggattggctcaacggcaaggagtacaagtgcaaggtgtccaacaagggcctgccctcctccatcgagaagaccatctccaaggctaagggccaacctcgggagccccaagtgtataccctccctcccagccaggaggagatgaccaagaatcaagtgagcctgacctgcctcgtgaagggattttacccctccgacatcgctgtggaatgggaaagcaatggccaacctgagaacaactacaagaccacaccccccgtgctggactccgatggctccttcttcctgtacagcaggctgaccgtggacaaatcccggtggcaagagggaaacgtgttcagctgctccgtgatgcacgaggctctccacaaccactacacccagaagagcctctccctgagcctcggctagtaa

SEQ ID NO: 1354 - DNA, 1332 bp, Artificial Sequence; identical to SEQ ID NO: 1353
  20H5.A3-VH7VL2 heavy chain DNA sequence

SEQ ID NO: 1355 - DNA, 1332 bp, Artificial Sequence; identical to SEQ ID NO: 1353
  20H5.A3-VH7VL3 heavy chain DNA sequence

SEQ ID NO: 1356 - DNA, 1332 bp, Artificial Sequence; identical to SEQ ID NO: 1353
  20H5.A3-VH7VL4 heavy chain DNA sequence

SEQ ID NO: 1357 - DNA, 1332 bp, Artificial Sequence; identical to SEQ ID NO: 1353
  20H5.A3-VH7VL5 heavy chain DNA sequence

SEQ ID NO: 1358 - DNA, 1332 bp, Artificial Sequence; identical to SEQ ID NO: 1353
  20H5.A3-VH7VL6 heavy chain DNA sequence

SEQ ID NO: 1359 - DNA, 1341 bp, Artificial Sequence
  20H5.A3_hVH3VL1-hIgG1 (KEMv2) heavy chain DNA sequence
caaatccagcttgttcagagtggatcagaactcaagaagcccggagcatccgtgaaagtgtcatgcaaggccagtggctacgcttttactacatatgggatgtcttgggttcggcaggcccccggccagggactagagtggatgggctgggttaacacctatagcggagtgcctacgtacgccgatgattttacaggcaggttcgtattttctctcgaaacgtccgtcagtaccgcctacctccaaattagctctctgaaagcagaggacaccgcagtctacttttgcgccagaggtccgtatgctatggattattggggacagggcaccctggtgacagtatcctccgctagcaccaaggggccctccgtgttccccctcgcaccatcctcaaaaagtaccagtgggggtactgctgctttgggctgcttggtgaaggactattttcctgagcctgtgacagttagttggaactccggggctctgacctcaggagtccatacatttccagcagtcttgcaaagtagcgggttgtattcattgtcctctgtcgtgaccgttccctcatctagcttggggactcaaacatatatttgcaatgtaaatcacaagccttcaaacaccaaagtagataagaaggtcgagcccaaatcatgtgacaaaacacatacatgccccccatgtccagccccagagctcctgggcgggccatctgtattcctgttccccccaaagcccaaagacactttgatgataagtcgtacccctgaggtaacttgcgtggttgtcgatgtgagtcatgaagaccctgaggttaagtttaactggtacgtagacggcgttgaagtacacaatgcaaaaacaaagccaagggaagagcagtacaactctacatatagagtggtttcagtcctcactgtactgcatcaagactggctcaatggtaaggaatacaagtgcaaggtctcaaacaaggccctccctgctccaatcgaaaagaccatatctaaagctaaagggcagcctcgggagcctcaggtttacactcttccaccctccagggaggaaatgacaaagaaccaggtcagtcttacttgtctggtcaaggggttctaccccagcgacatagccgtagaatgggaatcaaatgggcagccagagaataactataagacaacccctcccgtacttgactctgatggttctttctttctctactcaaaactgaccgttgataagtcccgctggcagcaggggaatgttttctcctgctccgtgatgcatgaggctctgcataatcactacacacagaaatctttgtcactcagtccaggctagtaa

SEQ ID NO: 1360 - DNA, 1341 bp, Artificial Sequence
  20H5.A3_hVH3VL1-hIgG1 (LALAPGv2) heavy chain DNA sequence
caaatccagcttgttcagagtggatcagaactcaagaagcccggagcatccgtgaaagtgtcatgcaaggccagtggctacgcttttactacatatgggatgtcttgggttcggcaggcccccggccagggactagagtggatgggctgggttaacacctatagcggagtgcctacgtacgccgatgattttacaggcaggttcgtattttctctcgaaacgtccgtcagtaccgcctacctccaaattagctctctgaaagcagaggacaccgcagtctacttttgcgccagaggtccgtatgctatggattattggggacagggcaccctggtgacagtatcctccgctagcaccaaggggccctccgtgtttcccttggcaccatcctcaaaaagtaccagtgggggtactgctgctttgggctgcttggtgaaggactattttcctgagcctgtgacagttagttggaactccggggctctgacctcaggagtccatacatttccagcagtcttgcaaagtagcgggttgtattcattgtcctctgtcgtgaccgttccctcatctagcttggggactcaaacatatatttgcaatgtaaatcacaagccttcaaacaccaaagtagataagaaggtcgagcccaaatcatgtgacaaaacacatacatgccccccatgtccagccccagaggccgccggcgggccatctgtattcctgttccccccaaagcccaaagacactttgatgataagtcgtacccctgaggtaacttgcgtggttgtcgatgtgagtcatgaagaccctgaggttaagtttaactggtacgtagacggcgttgaagtacacaatgcaaaaacaaagccaagggaagagcagtacaactctacatatagagtggtttcagtcctcactgtactgcatcaagactggctcaatggtaaggaatacaagtgcaaggtctcaaacaaggccctcggcgctccaatcgaaaagaccatatctaaagctaaagggcagcctcgggagcctcaggtttacactcttccaccctccagggaggaaatgacaaagaaccaggtcagtcttacttgtctggtcaaggggttctaccccagcgacatagccgtagaatgggaatcaaatgggcagccagagaataactataagacaacccctcccgtacttgactctgatggttctttctttctctactcaaaactgaccgttgataagtcccgctggcagcaggggaatgttttctcctgctccgtgatgcatgaggctctgcataatcactacacacagaaatctttgtcactcagtccaggctagtaa

SEQ ID NO: 1361 - DNA, 1341 bp, Artificial Sequence
  20H5.A3_hVH3VL1-hIgG1 (REM) heavy chain DNA sequence
caaatccagcttgttcagagtggatcagaactcaagaagcccggagcatccgtgaaagtgtcatgcaaggccagtggctacgcttttactacatatgggatgtcttgggttcggcaggcccccggccagggactagagtggatgggctgggttaacacctatagcggagtgcctacgtacgccgatgattttacaggcaggttcgtattttctctcgaaacgtccgtcagtaccgcctacctccaaattagctctctgaaagcagaggacaccgcagtctacttttgcgccagaggtccgtatgctatggattattggggacagggcaccctggtgacagtatcctccgctagcaccaaggggccctccgtgtttcccttggcaccatcctcaaaaagtaccagtgggggtactgctgctttgggctgcttggtgaaggactattttcctgagcctgtgacagttagttggaactccggggctctgacctcaggagtccatacatttccagcagtcttgcaaagtagcgggttgtattcattgtcctctgtcgtgaccgttccctcatctagcttggggactcaaacatatatttgcaatgtaaatcacaagccttcaaacaccaaagtagataagagggtcgagcccaaatcatgtgacaaaacacatacatgccccccatgtccagccccagagctcctgggcgggccatctgtattcctgttccccccaaagcccaaagacactttgatgataagtcgtacccctgaggtaacttgcgtggttgtcgatgtgagtcatgaagaccctgaggttaagtttaactggtacgtagacggcgttgaagtacacaatgcaaaaacaaagccaagggaagagcagtacaactctacatatagagtggtttcagtcctcactgtactgcatcaagactggctcaatggtaaggaatacaagtgcaaggtctcaaacaaggccctccctgctccaatcgaaaagaccatatctaaagctaaagggcagcctcgggagcctcaggtttacactcttccaccctccagggaggaaatgacaaagaaccaggtcagtcttacttgtctggtcaaggggttctaccccagcgacatagccgtagaatgggaatcaaatgggcagccagagaataactataagacaacccctcccgtacttgactctgatggttctttctttctctactcaaaactgaccgttgataagtcccgctggcagcaggggaatgttttctcctgctccgtgatgcatgaggctctgcataatcactacacacagaaatctttgtcactcagtccaggctagtaa

SEQ ID NO: 1362 - DNA, 1341 bp, Artificial Sequence
  20H5.A3_hVH5VL1-hIgG1 (KEMv2) heavy chain DNA sequence
caagtgcaactggtgcagagcggctttgagctgaaaaagcccggcgcctctgtgaagatcagttgcaaagcttccggctacgcctttaccacctatggtatgtcttgggttagacaggctccaggacagggcctggagtggatgggttgggtcaatacctactctggagtgccaacctatgctcaggcattcacaggccggtttgtcttcagtctcgataccagcgtgtcaaccgcatacctgcagatcagctctcttaaagccgaggataccgctgtctactactgtgccagaggaccttatgccatggattactgggggcaaggcaccctcgtcacagtgtcttctgctagcaccaaggggccctccgtgttccccctcgcaccatcctcaaaaagtaccagtgggggtactgctgctttgggctgcttggtgaaggactattttcctgagcctgtgacagttagttggaactccggggctctgacctcaggagtccatacatttccagcagtcttgcaaagtagcgggttgtattcattgtcctctgtcgtgaccgttccctcatctagcttggggactcaaacatatatttgcaatgtaaatcacaagccttcaaacaccaaagtagataagaaggtcgagcccaaatcatgtgacaaaacacatacatgccccccatgtccagccccagagctcctgggcgggccatctgtattcctgttccccccaaagcccaaagacactttgatgataagtcgtacccctgaggtaacttgcgtggttgtcgatgtgagtcatgaagaccctgaggttaagtttaactggtacgtagacggcgttgaagtacacaatgcaaaaacaaagccaagggaagagcagtacaactctacatatagagtggtttcagtcctcactgtactgcatcaagactggctcaatggtaaggaatacaagtgcaaggtctcaaacaaggccctccctgctccaatcgaaaagaccatatctaaagctaaagggcagcctcgggagcctcaggtttacactcttccaccctccagggaggaaatgacaaagaaccaggtcagtcttacttgtctggtcaaggggttctaccccagcgacatagccgtagaatgggaatcaaatgggcagccagagaataactataagacaacccctcccgtacttgactctgatggttctttctttctctactcaaaactgaccgttgataagtcccgctggcagcaggggaatgttttctcctgctccgtgatgcatgaggctctgcataatcactacacacagaaatctttgtcactcagtccaggctagtaa

SEQ ID NO: 1363 - DNA, 1341 bp, Artificial Sequence
  20H5.A3_hVH5VL1-hIgG1 (LALAPGv2) heavy chain DNA sequence
caagtgcaactggtgcagagcggctttgagctgaaaaagcccggcgcctctgtgaagatcagttgcaaagcttccggctacgcctttaccacctatggtatgtcttgggttagacaggctccaggacagggcctggagtggatgggttgggtcaatacctactctggagtgccaacctatgctcaggcattcacaggccggtttgtcttcagtctcgataccagcgtgtcaaccgcatacctgcagatcagctctcttaaagccgaggataccgctgtctactactgtgccagaggaccttatgccatggattactgggggcaaggcaccctcgtcacagtgtcttctgctagcaccaaggggccctccgtgtttcccttggcaccatcctcaaaaagtaccagtgggggtactgctgctttgggctgcttggtgaaggactattttcctgagcctgtgacagttagttggaactccggggctctgacctcaggagtccatacatttccagcagtcttgcaaagtagcgggttgtattcattgtcctctgtcgtgaccgttccctcatctagcttggggactcaaacatatatttgcaatgtaaatcacaagccttcaaacaccaaagtagataagaaggtcgagcccaaatcatgtgacaaaacacatacatgccccccatgtccagccccagaggccgccggcgggccatctgtattcctgttccccccaaagcccaaagacactttgatgataagtcgtacccctgaggtaacttgcgtggttgtcgatgtgagtcatgaagaccctgaggttaagtttaactggtacgtagacggcgttgaagtacacaatgcaaaaacaaagccaagggaagagcagtacaactctacatatagagtggtttcagtcctcactgtactgcatcaagactggctcaatggtaaggaatacaagtgcaaggtctcaaacaaggccctcggcgctccaatcgaaaagaccatatctaaagctaaagggcagcctcgggagcctcaggtttacactcttccaccctccagggaggaaatgacaaagaaccaggtcagtcttacttgtctggtcaaggggttctaccccagcgacatagccgtagaatgggaatcaaatgggcagccagagaataactataagacaacccctcccgtacttgactctgatggttctttctttctctactcaaaactgaccgttgataagtcccgctggcagcaggggaatgttttctcctgctccgtgatgcatgaggctctgcataatcactacacacagaaatctttgtcactcagtccaggctagtaa

SEQ ID NO: 1364 - DNA, 1341 bp, Artificial Sequence
  20H5.A3_hVH5VL1-hIgG1 (REM) heavy chain DNA sequence
caagtgcaactggtgcagagcggctttgagctgaaaaagcccggcgcctctgtgaagatcagttgcaaagcttccggctacgcctttaccacctatggtatgtcttgggttagacaggctccaggacagggcctggagtggatgggttgggtcaatacctactctggagtgccaacctatgctcaggcattcacaggccggtttgtcttcagtctcgataccagcgtgtcaaccgcatacctgcagatcagctctcttaaagccgaggataccgctgtctactactgtgccagaggaccttatgccatggattactgggggcaaggcaccctcgtcacagtgtcttctgctagcaccaaggggccctccgtgtttcccttggcaccatcctcaaaaagtaccagtgggggtactgctgctttgggctgcttggtgaaggactattttcctgagcctgtgacagttagttggaactccggggctctgacctcaggagtccatacatttccagcagtcttgcaaagtagcgggttgtattcattgtcctctgtcgtgaccgttccctcatctagcttggggactcaaacatatatttgcaatgtaaatcacaagccttcaaacaccaaagtagataagagggtcgagcccaaatcatgtgacaaaacacatacatgccccccatgtccagccccagagctcctgggcgggccatctgtattcctgttccccccaaagcccaaagacactttgatgataagtcgtacccctgaggtaacttgcgtggttgtcgatgtgagtcatgaagaccctgaggttaagtttaactggtacgtagacggcgttgaagtacacaatgcaaaaacaaagccaagggaagagcagtacaactctacatatagagtggtttcagtcctcactgtactgcatcaagactggctcaatggtaaggaatacaagtgcaaggtctcaaacaaggccctccctgctccaatcgaaaagaccatatctaaagctaaagggcagcctcgggagcctcaggtttacactcttccaccctccagggaggaaatgacaaagaaccaggtcagtcttacttgtctggtcaaggggttctaccccagcgacatagccgtagaatgggaatcaaatgggcagccagagaataactataagacaacccctcccgtacttgactctgatggttctttctttctctactcaaaactgaccgttgataagtcccgctggcagcaggggaatgttttctcctgctccgtgatgcatgaggctctgcataatcactacacacagaaatctttgtcactcagtccaggctagtaa

SEQ ID NO: 1365 - DNA, 1341 bp, Artificial Sequence
  20H5.A3_hVH6VL1-hIgG1 (KEMv2) heavy chain DNA sequence
caggttcagcttgtccaatcaggctttgagctgaagaagcctggagctagcgtcaagattagttgtaaggcctcaggctacgctttcaccacctacggaatgtcctgggtgcggcaagccccaggccagggcctggagtggatgggatgggtgaatacgtacagtggcgtccccactagcgcccaggcttttactggaagattcgtgttctctcttgatacctccgtatcaaccgcttacctgcagataagttcactcaaggctgaggataccgccgtgtattattgtgcccgagggccctacgctatggattactggggacagggcacactcgtaacagtgagctctgctagcaccaaggggccctccgtgttccccctcgcaccatcctcaaaaagtaccagtgggggtactgctgctttgggctgcttggtgaaggactattttcctgagcctgtgacagttagttggaactccggggctctgacctcaggagtccatacatttccagcagtcttgcaaagtagcgggttgtattcattgtcctctgtcgtgaccgttccctcatctagcttggggactcaaacatatatttgcaatgtaaatcacaagccttcaaacaccaaagtagataagaaggtcgagcccaaatcatgtgacaaaacacatacatgccccccatgtccagccccagagctcctgggcgggccatctgtattcctgttccccccaaagcccaaagacactttgatgataagtcgtacccctgaggtaacttgcgtggttgtcgatgtgagtcatgaagaccctgaggttaagtttaactggtacgtagacggcgttgaagtacacaatgcaaaaacaaagccaagggaagagcagtacaactctacatatagagtggtttcagtcctcactgtactgcatcaagactggctcaatggtaaggaatacaagtgcaaggtctcaaacaaggccctccctgctccaatcgaaaagaccatatctaaagctaaagggcagcctcgggagcctcaggtttacactcttccaccctccagggaggaaatgacaaagaaccaggtcagtcttacttgtctggtcaaggggttctaccccagcgacatagccgtagaatgggaatcaaatgggcagccagagaataactataagacaacccctcccgtacttgactctgatggttctttctttctctactcaaaactgaccgttgataagtcccgctggcagcaggggaatgttttctcctgctccgtgatgcatgaggctctgcataatcactacacacagaaatctttgtcactcagtccaggctagtaa

SEQ ID NO: 1366 - DNA, 1341 bp, Artificial Sequence
  20H5.A3_hVH6VL1-hIgG1 (LALAPGv2) heavy chain DNA sequence
caggttcagcttgtccaatcaggctttgagctgaagaagcctggagctagcgtcaagattagttgtaaggcctcaggctacgctttcaccacctacggaatgtcctgggtgcggcaagccccaggccagggcctggagtggatgggatgggtgaatacgtacagtggcgtccccactagcgcccaggcttttactggaagattcgtgttctctcttgatacctccgtatcaaccgcttacctgcagataagttcactcaaggctgaggataccgccgtgtattattgtgcccgagggccctacgctatggattactggggacagggcacactcgtaacagtgagctctgctagcaccaaggggccctccgtgtttcccttggcaccatcctcaaaaagtaccagtgggggtactgctgctttgggctgcttggtgaaggactattttcctgagcctgtgacagttagttggaactccggggctctgacctcaggagtccatacatttccagcagtcttgcaaagtagcgggttgtattcattgtcctctgtcgtgaccgttccctcatctagcttggggactcaaacatatatttgcaatgtaaatcacaagccttcaaacaccaaagtagataagaaggtcgagcccaaatcatgtgacaaaacacatacatgccccccatgtccagccccagaggccgccggcgggccatctgtattcctgttccccccaaagcccaaagacactttgatgataagtcgtacccctgaggtaacttgcgtggttgtcgatgtgagtcatgaagaccctgaggttaagtttaactggtacgtagacggcgttgaagtacacaatgcaaaaacaaagccaagggaagagcagtacaactctacatatagagtggtttcagtcctcactgtactgcatcaagactggctcaatggtaaggaatacaagtgcaaggtctcaaacaaggccctcggcgctccaatcgaaaagaccatatctaaagctaaagggcagcctcgggagcctcaggtttacactcttccaccctccagggaggaaatgacaaagaaccaggtcagtcttacttgtctggtcaaggggttctaccccagcgacatagccgtagaatgggaatcaaatgggcagccagagaataactataagacaacccctcccgtacttgactctgatggttctttctttctctactcaaaactgaccgttgataagtcccgctggcagcaggggaatgttttctcctgctccgtgatgcatgaggctctgcataatcactacacacagaaatctttgtcactcagtccaggctagtaa

SEQ ID NO: 1367 - DNA, 1341 bp, Artificial Sequence
  20H5.A3_hVH6VL1-hIgG1 (REM) heavy chain DNA sequence
caggttcagcttgtccaatcaggctttgagctgaagaagcctggagctagcgtcaagattagttgtaaggcctcaggctacgctttcaccacctacggaatgtcctgggtgcggcaagccccaggccagggcctggagtggatgggatgggtgaatacgtacagtggcgtccccactagcgcccaggcttttactggaagattcgtgttctctcttgatacctccgtatcaaccgcttacctgcagataagttcactcaaggctgaggataccgccgtgtattattgtgcccgagggccctacgctatggattactggggacagggcacactcgtaacagtgagctctgctagcaccaaggggccctccgtgtttcccttggcaccatcctcaaaaagtaccagtgggggtactgctgctttgggctgcttggtgaaggactattttcctgagcctgtgacagttagttggaactccggggctctgacctcaggagtccatacatttccagcagtcttgcaaagtagcgggttgtattcattgtcctctgtcgtgaccgttccctcatctagcttggggactcaaacatatatttgcaatgtaaatcacaagccttcaaacaccaaagtagataagagggtcgagcccaaatcatgtgacaaaacacatacatgccccccatgtccagccccagagctcctgggcgggccatctgtattcctgttccccccaaagcccaaagacactttgatgataagtcgtacccctgaggtaacttgcgtggttgtcgatgtgagtcatgaagaccctgaggttaagtttaactggtacgtagacggcgttgaagtacacaatgcaaaaacaaagccaagggaagagcagtacaactctacatatagagtggtttcagtcctcactgtactgcatcaagactggctcaatggtaaggaatacaagtgcaaggtctcaaacaaggccctccctgctccaatcgaaaagaccatatctaaagctaaagggcagcctcgggagcctcaggtttacactcttccaccctccagggaggaaatgacaaagaaccaggtcagtcttacttgtctggtcaaggggttctaccccagcgacatagccgtagaatgggaatcaaatgggcagccagagaataactataagacaacccctcccgtacttgactctgatggttctttctttctctactcaaaactgaccgttgataagtcccgctggcagcaggggaatgttttctcctgctccgtgatgcatgaggctctgcataatcactacacacagaaatctttgtcactcagtccaggctagtaa

SEQ ID NO: 1368 - DNA, 645 bp, Artificial Sequence
  20H5.A3-hIgG4 (S228P) light chain DNA sequence
gatatccagatgacacagactacatcctccctgtctgcctctctgggagacagagtcaccatcaattgcagtgcaagtcaggacattagcaattatttaaactggtatcagcagaaaccagatggaactgttaaactcctgatctattacacatcaagtttactctcaggagtcccatcaaggttcagtggcagtgggtctgggacagattattctctcaccatcagcaacctggaacctgaagatattgccacttacttttgtcagcaatatagtaagcttccctatacgttcggatcggggacccacctggaaataaaacggaccgtggccgcccccagcgtgttcatcttccctcccagcgacgagcagctgaagtctggcaccgccagcgtggtgtgcctgctgaacaacttctacccccgcgaggccaaggtgcagtggaaggtggacaacgccctgcagagcggcaacagccaggagagcgtgaccgagcaggactccaaggacagcacctacagcctgagcagcaccctgaccctgagcaaggccgactacgagaagcacaaggtgtacgcctgcgaggtgacccaccagggactgtctagccccgtgaccaagagcttcaaccggggcgagtgctaa

SEQ ID NO: 1369 - DNA, 645 bp, Artificial Sequence
  20H5.A3-hIgG4 (S28P)-mv2 light chain DNA sequence
gatatccagatgacacagactacatcctccctgtctgcctctctgggagacagagtcaccatcaattgcagtgcaagtcaggacattagcaattatttaaactggtatcagcagaaaccagatggaactgttaaactcctgatctattacacatcaagtttactctcaggagtcccatcaaggttcagtggcagtgggtctgggacagattattctctcaccatcagcaacctggaacctgaagatattgccacttacttttgtcagcaatatagtaagcttccctatacgttcggatcggggaccaaactggaaataaaacggaccgtggccgcccccagcgtgttcatcttccctcccagcgacgagcagctgaagtctggcaccgccagcgtggtgtgcctgctgaacaacttctacccccgcgaggccaaggtgcagtggaaggtggacaacgccctgcagagcggcaacagccaggagagcgtgaccgagcaggactccaaggacagcacctacagcctgagcagcaccctgaccctgagcaaggccgactacgagaagcacaaggtgtacgcctgcgaggtgacccaccagggactgtctagccccgtgaccaagagcttcaaccggggcgagtgctaa

SEQ ID NO: 1370 - DNA, 645 bp, Artificial Sequence
  798-9.20H5.A3-mH0mL1 light chain DNA sequence
gatatccagatgacacagactacatcctccctgtctgcctctctgggagacagagtcaccatcagttgcagtgcaagtcaggacattagcaattatttaaactggtatcagcagaaaccagatggaactgttaaactcctgatctattacacatcaagtttactctcaggagtcccatcaaggttcagtggcagtgggtctgggacagattattctctcaccatcagcaacctggaacctgaagatattgccacttacttttgtcagcaatatagtaagcttccctatacgttcggatcggggacccacctggaaataaaacggaccgtggccgcccccagcgtgttcatcttccctcccagcgacgagcagctgaagtctggcaccgccagcgtggtgtgcctgctgaacaacttctacccccgcgaggccaaggtgcagtggaaggtggacaacgccctgcagagcggcaacagccaggagagcgtgaccgagcaggactccaaggacagcacctacagcctgagcagcaccctgaccctgagcaaggccgactacgagaagcacaaggtgtacgcctgcgaggtgacccaccagggactgtctagccccgtgaccaagagcttcaaccggggcgagtgctaa

SEQ ID NO: 1371 - DNA, 648 bp, Artificial Sequence
  798-9.20H5.A3-mH1mL0 light chain DNA sequence
gatatccagatgacccagaccacaagctctctgtccgctagccttggagacagagtgaccatcaactgcagtgcaagccaggatatctccaactacctgaattggtaccagcagaagcctgacggtacggtgaaacttctaatatactacacttcatctctgctgtctggggtgcccagtaggttcagcggtagcggttcagggactgattattcacttacgatatcaaacctggaacccgaggacattgccacttacttctgccagcagtacagtaagttgccttatacattcggtagtggaactcaccttgagattaaacgtgctgatgttgcccctactgtgtccatcttccccccctcctccgagcagctgacatccggcggcgcctccgtggtgtgcttcctgaacaacttctaccccaaagacatcaacgtgaaatggaaaatcgacggctccgagaggcagaacggcgtgctgaactcctggacagaccaggactccaaagactccacatactccatgtcctccacactgacactgacaaaagacgagtacgagaggcacaactcctacacatgcgaggccacacacaaaacatccacatcccccatcgtgaaatccttcaacaggaacgagtgctaataa

SEQ ID NO: 1372 - DNA, 645 bp, Artificial Sequence; identical to SEQ ID NO: 1370
  798-9.20H5.A3-mH1mL1 light chain DNA sequence

SEQ ID NO: 1373 - DNA, 648 bp, Artificial Sequence; identical to SEQ ID NO: 1371
  798-9.20H5.A3-mH2mL0 light chain DNA sequence

SEQ ID NO: 1374 - DNA, 645 bp, Artificial Sequence; identical to SEQ ID NO: 1370
  798-9.20H5.A3-mH2mL1 light chain DNA sequence

SEQ ID NO: 1375 - DNA, 645 bp, Artificial Sequence; identical to SEQ ID NO: 919
  20H5.A3-VH1VL1 light chain DNA sequence

SEQ ID NO: 1376 - DNA, 645 bp, Artificial Sequence
  20H5.A3-VH1VL2 light chain DNA sequence
gacatccaaatgacacagagtcccagttcccttagtgcctccgtgggggaccgtgttactatcacatgctcagctagccaagacatatccaattacctaaattggtatcagcagaagcctggcaaagcacctaagctcctgatttattacacctcatccctgttgacgggggttcccagccggtttagcggtagtgggtcaggaacagactacaccttcactataagcagcctgcaacccgaggatattgctacttatttttgtcagcagtattccaagctgccttacacattcggtcagggcacaaagctggaaattaagaggaccgtggccgcccccagcgtgttcatcttccctcccagcgacgagcagctgaagtctggcaccgccagcgtggtgtgcctgctgaacaacttctacccccgcgaggccaaggtgcagtggaaggtggacaacgccctgcagagcggcaacagccaggagagcgtgaccgagcaggactccaaggacagcacctacagcctgagcagcaccctgaccctgagcaaggccgactacgagaagcacaaggtgtacgcctgcgaggtgacccaccagggactgtctagccccgtgaccaagagcttcaaccggggcgagtgctaa

SEQ ID NO: 1377 - DNA, 645 bp, Artificial Sequence; identical to SEQ ID NO: 920
  20H5.A3-VH1VL3 light chain DNA sequence

SEQ ID NO: 1378 - DNA, 645 bp, Artificial Sequence
  20H5.A3-VH1VL4 light chain DNA sequence
gacattcaaatgacacagagcccctctagtttgtcagccagtgtcggagaccgggtgactattacatgctcagccagtcaagacatcagcaactatctaaattggtatcagcagaaacccgggaaggctcctaagctgctgatttattacacatctagcttgctgagcggggtcccgagtagattcagtggatccggttctgggacagactataccctcaccatctcatccctgcaaccagaggacttcgctacttacttctgccagcagtatagcaaacttccctacacatttggacaggggacaaaactggagattaaaaggaccgtggccgcccccagcgtgttcatcttccctcccagcgacgagcagctgaagtctggcaccgccagcgtggtgtgcctgctgaacaacttctacccccgcgaggccaaggtgcagtggaaggtggacaacgccctgcagagcggcaacagccaggagagcgtgaccgagcaggactccaaggacagcacctacagcctgagcagcaccctgaccctgagcaaggccgactacgagaagcacaaggtgtacgcctgcgaggtgacccaccagggactgtctagccccgtgaccaagagcttcaaccggggcgagtgctaa

SEQ ID NO: 1379 - DNA, 645 bp, Artificial Sequence
  20H5.A3-VH1VL5 light chain DNA sequence
gacatccaaatgacacagagtcccagttcccttagtgcctccgtgggggaccgtgttactatcaactgctcagctagccaagacatatccaattacctaaattggtatcagcagaagcctggcaaagcacctaagctcctgatttattacacctcatccctgttgacgggggttcccagccggtttagcggtagtgggtcaggaacagactacaccttcactataagcagcctgcaacccgaggatattgctacttatttttgtcagcagtattccaagctgccttacacattcggtcagggcacaaagctggaaattaagaggaccgtggccgcccccagcgtgttcatcttccctcccagcgacgagcagctgaagtctggcaccgccagcgtggtgtgcctgctgaacaacttctacccccgcgaggccaaggtgcagtggaaggtggacaacgccctgcagagcggcaacagccaggagagcgtgaccgagcaggactccaaggacagcacctacagcctgagcagcaccctgaccctgagcaaggccgactacgagaagcacaaggtgtacgcctgcgaggtgacccaccagggactgtctagccccgtgaccaagagcttcaaccggggcgagtgctaa

SEQ ID NO: 1380 - DNA, 645 bp, Artificial Sequence
  20H5.A3-VH1VL6 light chain DNA sequence
gacattcaaatgacacagagcccctctagtttgtcagccagtgtcggagaccgggtgactattaactgctcagccagtcaagacatcagcaactatctaaattggtatcagcagaaacccgggaaggctcctaagctgctgatttattacacatctagcttgctgagcggggtcccgagtagattcagtggatccggttctgggacagactataccctcaccatctcatccctgcaaccagaggacttcgctacttacttctgccagcagtatagcaaacttccctacacatttggacaggggacaaaactggagattaaaaggaccgtggccgcccccagcgtgttcatcttccctcccagcgacgagcagctgaagtctggcaccgccagcgtggtgtgcctgctgaacaacttctacccccgcgaggccaaggtgcagtggaaggtggacaacgccctgcagagcggcaacagccaggagagcgtgaccgagcaggactccaaggacagcacctacagcctgagcagcaccctgaccctgagcaaggccgactacgagaagcacaaggtgtacgcctgcgaggtgacccaccagggactgtctagccccgtgaccaagagcttcaaccggggcgagtgctaa

SEQ ID NO: 1381 - DNA, 645 bp, Artificial Sequence; identical to SEQ ID NO: 920
  20H5.A3-VH2VL3 light chain DNA sequence

SEQ ID NO: 1382 - DNA, 645 bp, Artificial Sequence; identical to SEQ ID NO: 1378
  20H5.A3-VH2VL4 light chain DNA sequence

SEQ ID NO: 1383 - DNA, 645 bp, Artificial Sequence; identical to SEQ ID NO: 1379
  20H5.A3-VH2VL5 light chain DNA sequence

SEQ ID NO: 1384 - DNA, 645 bp, Artificial Sequence; identical to SEQ ID NO: 1380
  20H5.A3-VH2VL6 light chain DNA sequence

SEQ ID NO: 1385 - DNA, 645 bp, Artificial Sequence; identical to SEQ ID NO: 1379
  20H5.A3-VH3VL5 light chain DNA sequence

SEQ ID NO: 1386 - DNA, 645 bp, Artificial Sequence; identical to SEQ ID NO: 1380
  20H5.A3-VH3VL6 light chain DNA sequence

SEQ ID NO: 1387 - DNA, 645 bp, Artificial Sequence; identical to SEQ ID NO: 920
  20H5.A3-VH4VL3 light chain DNA sequence

SEQ ID NO: 1388 - DNA, 645 bp, Artificial Sequence; identical to SEQ ID NO: 1378
  20H5.A3-VH4VL4 light chain DNA sequence

SEQ ID NO: 1389 - DNA, 645 bp, Artificial Sequence; identical to SEQ ID NO: 1379
  20H5.A3-VH4VL5 light chain DNA sequence

SEQ ID NO: 1390 - DNA, 645 bp, Artificial Sequence; identical to SEQ ID NO: 1380
  20H5.A3-VH4VL6 light chain DNA sequence

SEQ ID NO: 1391 - DNA, 645 bp, Artificial Sequence; identical to SEQ ID NO: 1379
  20H5.A3-VH5VL5 light chain DNA sequence

SEQ ID NO: 1392 - DNA, 645 bp, Artificial Sequence; identical to SEQ ID NO: 1380
  20H5.A3-VH5VL6 light chain DNA sequence

SEQ ID NO: 1393 - DNA, 645 bp, Artificial Sequence; identical to SEQ ID NO: 1378
  20H5.A3-VH6VL4 light chain DNA sequence

SEQ ID NO: 1394 - DNA, 645 bp, Artificial Sequence; identical to SEQ ID NO: 1379
  20H5.A3-VH6VL5 light chain DNA sequence

SEQ ID NO: 1395 - DNA, 645 bp, Artificial Sequence; identical to SEQ ID NO: 1378
  20H5.A3-VH6VL6 light chain DNA sequence

SEQ ID NO: 1396 - DNA, 645 bp, Artificial Sequence; identical to SEQ ID NO: 919
  20H5.A3-VH7VL1 light chain DNA sequence

SEQ ID NO: 1397 - DNA, 645 bp, Artificial Sequence; identical to SEQ ID NO: 1376
  20H5.A3-VH7VL2 light chain DNA sequence

SEQ ID NO: 1398 - DNA, 645 bp, Artificial Sequence; identical to SEQ ID NO: 920
  20H5.A3-VH7VL3 light chain DNA sequence

SEQ ID NO: 1399 - DNA, 645 bp, Artificial Sequence; identical to SEQ ID NO: 1378
  20H5.A3-VH7VL4 light chain DNA sequence

SEQ ID NO: 1400 - DNA, 645 bp, Artificial Sequence; identical to SEQ ID NO: 1379
  20H5.A3-VH7VL5 light chain DNA sequence

SEQ ID NO: 1401 - DNA, 645 bp, Artificial Sequence; identical to SEQ ID NO: 1379
  20H5.A3-VH7VL6 light chain DNA sequence

SEQ ID NO: 1402 - DNA, 645 bp, Artificial Sequence; identical to SEQ ID NO: 919
  20H5.A3_hVH3VL1-hIgG1 (KEMv2) light chain DNA sequence

SEQ ID NO: 1403 - DNA, 645 bp, Artificial Sequence; identical to SEQ ID NO: 919
  20H5.A3_hVH3VL1-hIgG1 (LALAPGv2) light chain DNA sequence

SEQ ID NO: 1404 - DNA, 645 bp, Artificial Sequence; identical to SEQ ID NO: 919
  20H5.A3_hVH3VL1-hIgG1 (REM) light chain DNA sequence

SEQ ID NO: 1405 - DNA, 645 bp, Artificial Sequence; identical to SEQ ID NO: 919
  20H5.A3_hVH5VL1-hIgG1 (KEMv2) light chain DNA sequence

SEQ ID NO: 1406 - DNA, 645 bp, Artificial Sequence; identical to SEQ ID NO: 919
  20H5.A3_hVH5VL1-hIgG1 (LALAPGv2) light chain DNA sequence

SEQ ID NO: 1407 - DNA, 645 bp, Artificial Sequence; identical to SEQ ID NO: 919
  20H5.A3_hVH5VL1-hIgG1 (REM) light chain DNA sequence

SEQ ID NO: 1408 - DNA, 645 bp, Artificial Sequence; identical to SEQ ID NO: 919
  20H5.A3_hVH6VL1-hIgG1 (KEMv2) light chain DNA sequence

SEQ ID NO: 1409 - DNA, 645 bp, Artificial Sequence; identical to SEQ ID NO: 919
  20H5.A3_hVH6VL1-hIgG1 (LALAPGv2) light chain DNA sequence

SEQ ID NO: 1410 - DNA, 645 bp, Artificial Sequence; identical to SEQ ID NO: 919
  20H5.A3_hVH6VL1-hIgG1 (REM) light chain DNA sequence

SEQ ID NO: 1411 - protein, 440 aa, Artificial Sequence
  F847C.21H6 heavy chain peptide sequence
QIQLVQSGPELKKPGETVKISCKASGYTFTIFGMNWVKQAPGKGLKWMGWVNTYTGEPTYADDFKGRFAFSLETSASTAYLQINNLKNEDTATYFCARGWFAYWGQGTLVTVSAASTKGPSVFPLAPCSRSTSESTAALGCLVKDYFPEPVTVSWNSGALTSGVHTFPAVLQSSGLYSLSSVVTVPSSSLGTKTYTCNVDHKPSNTKVDKRVESKYGPPCPPCPAPEFLGGPSVFLFPPKPKDTLMISRTPEVTCVVVDVSQEDPEVQFNWYVDGVEVHNAKTKPREEQFNSTYRVVSVLTVLHQDWLNGKEYKCKVSNKGLPSSIEKTISKAKGQPREPQVYTLPPSQEEMTKNQVSLTCLVKGFYPSDIAVEWESNGQPENNYKTTPPVLDSDGSFFLYSRLTVDKSRWQEGNVFSCSVMHEALHNHYTQKSLSLSLG

SEQ ID NO: 1412 - protein, 219 aa, Artificial Sequence
  F847C.21H6 light chain peptide sequence
DVVMTQTPLTLSVTIGQPASISCKSSRSLLDSDGKTYLNWLLQRPGQSPKRLIYLVSKLDSGVPDRFTGSGSGTDFTLKISRVEAEDLGVYYCWQGTHFPQTFGGGTKLEINRTVAAPSVFIFPPSDEQLKSGTASVVCLLNNFYPREAKVQWKVDNALQSGNSQESVTEQDSKDSTYSLSSTLTLSKADYEKHKVYACEVTHQGLSSPVTKSFNRGEC

SEQ ID NO: 1413 - DNA, 1326 bp, Artificial Sequence
  F847C.21H6 heavy chain DNA sequence
cagatccagttggtgcagtctggacctgagctgaagaagcctggagagacagtcaagatctcctgcaaggcttctgggtataccttcacaatctttggaatgaactgggtgaagcaggctccaggaaagggtttaaagtggatgggctgggtaaacacctacactggagagccaacatatgctgatgacttcaagggacggtttgccttctctttggaaacctctgccagcactgcctatttgcagatcaacaacctcaaaaatgaggacacggctacatatttctgtgcaagaggctggtttgcttactggggccaagggactctggtcactgtctctgcagctagcaccaagggccccagcgtgtttcctctcgctccctgcagccggagcacatccgagagcaccgctgctctgggctgtctcgtgaaggactacttccctgaacccgtcaccgtcagctggaatagcggcgccctgacatccggcgtccacacattccccgctgtcctgcagagcagcggcctgtacagcctgagctccgtggtcaccgtgcctagcagcagcctgggaacaaagacctacacctgcaacgtggaccataagccctccaacaccaaggtggacaagcgggtggaatccaagtatggacccccctgtcctccttgccctgctcctgaatttctcggaggcccctccgtcttcctgtttccccccaagcccaaggacaccctgatgatctcccggacacccgaagtcacctgcgtcgtggtggatgtcagccaggaagatcccgaggtgcagttcaactggtacgtggacggagtggaggtgcataacgccaaaaccaagcccagggaagagcagttcaacagcacctatcgggtcgtgtccgtgctcaccgtcctgcatcaggattggctcaacggcaaggagtacaagtgcaaggtgtccaacaagggcctgccctcctccatcgagaagaccatctccaaggctaagggccaacctcgggagccccaagtgtataccctccctcccagccaggaggagatgaccaagaatcaagtgagcctgacctgcctcgtgaagggattttacccctccgacatcgctgtggaatgggaaagcaatggccaacctgagaacaactacaagaccacaccccccgtgctggactccgatggctccttcttcctgtacagcaggctgaccgtggacaaatcccggtggcaagagggaaacgtgttcagctgctccgtgatgcacgaggctctccacaaccactacacccagaagagcctctccctgagcctcggctagtaa

SEQ ID NO: 1414 - DNA, 661 bp, Artificial Sequence
  F847C.21H6 light chain DNA sequence
gatgttgtgatgacccagactccactcactttgtcggttaccattggacaaccagcctccatctcttgcaagtcaagtcggagcctcttagatagtgatggaaagacatatttgaattggttgttacagaggccaggccagtctccaaagcgcctaatctatctggtgtccaaactggactctggagtccctgacaggttcactggcagtggatcagggacagatttcacactgaaaatcagcagagtggaggctgaggatttgggagtttattattgctggcaaggtacacattttcctcagacgttcggtggaggcaccaagctggaaatcaataggaccgtggccgcccccagcgtgttcatcttccctcccagcgacgagcagctgaagtctggcaccgccagcgtggtgtgcctgctgaacaacttctacccccgcgaggccaaggtgcagtggaaggtggacaacgccctgcagagcggcaacagccaggagagcgtgaccgagcaggactccaaggacagcacctacagcctgagcagcaccctgaccctgagcaaggccgactacgagaagcacaaggtgtacgcctgcgaggtgacccaccagggactgtctagccccgtgaccaagagcttcaaccggggcgagtgctaag

SEQ ID NO: 1415 - protein, 114 aa, Artificial Sequence; identical to SEQ ID NO: 367
  VH-152 Peptide Sequence

SEQ ID NO: 1416 - protein, 114 aa, Artificial Sequence
  VH-153 Peptide Sequence
QVQLVQSGSELKKPGASVKVSCKASGYTFTIFGMNWVRQAPGQGLEWMGWVNTYTGEPTYAQGFTGRFVFSLDTSVSTAYLQISSLKAEDTAVYYCARGWFAYWGQGTLVTVSS

SEQ ID NO: 1417 - protein, 114 aa, Artificial Sequence; identical to SEQ ID NO: 1416
  VH-154 Peptide Sequence

SEQ ID NO: 1418 - protein, 114 aa, Artificial Sequence; identical to SEQ ID NO: 1416
  VH-155 Peptide Sequence

SEQ ID NO: 1419 - protein, 114 aa, Artificial Sequence; identical to SEQ ID NO: 1416
  VH-156 Peptide Sequence

SEQ ID NO: 1420 - protein, 114 aa, Artificial Sequence
  VH-157 Peptide Sequence
QIQLVQSGSELKKPGASVKVSCKASGYTFTIFGMNWVRQAPGQGLEWMGWVNTYTGEPTYAQGFTGRFVFSLDTSVSTAYLQISSLKAEDTAVYFCARGWFAYWGQGTLVTVSS

SEQ ID NO: 1421 - protein, 114 aa, Artificial Sequence; identical to SEQ ID NO: 1420
  VH-158 Peptide Sequence

SEQ ID NO: 1422 - protein, 114 aa, Artificial Sequence; identical to SEQ ID NO: 1420
  VH-159 Peptide Sequence

SEQ ID NO: 1423 - protein, 114 aa, Artificial Sequence; identical to SEQ ID NO: 1420
  VH-160 Peptide Sequence

SEQ ID NO: 1424 - protein, 114 aa, Artificial Sequence
  VH-161 Peptide Sequence
QIQLVQSGSELKKPGASVKVSCKASGYTFTIFGMNWVRQAPGQGLEWMGWVNTYTGEPTYADDFTGRFVFSLDTSVSTAYLQISSLKAEDTAVYFCARGWFAYWGQGTLVTVSS

SEQ ID NO: 1425 - protein, 114 aa, Artificial Sequence; identical to SEQ ID NO: 1424
  VH-162 Peptide Sequence

SEQ ID NO: 1426 - protein, 114 aa, Artificial Sequence; identical to SEQ ID NO: 1424
  VH-163 Peptide Sequence

SEQ ID NO: 1427 - protein, 114 aa, Artificial Sequence; identical to SEQ ID NO: 1424
  VH-164 Peptide Sequence

SEQ ID NO: 1428 - protein, 114 aa, Artificial Sequence
  VH-165 Peptide Sequence
QVQLVQSGSELKKPGASVKVSCKASGYTFTIFGMNWVRQAPGQGLEWMGWVNTYTGEPTYAQGFTGRFVFSLDTSVSMAYLQISSLKAEDTAVYYCARGWFAYWGQGTLVTVSS

SEQ ID NO: 1429 - protein, 114 aa, Artificial Sequence; identical to SEQ ID NO: 1428
  VH-166 Peptide Sequence

SEQ ID NO: 1430 - protein, 114 aa, Artificial Sequence; identical to SEQ ID NO: 1428
  VH-167 Peptide Sequence

SEQ ID NO: 1431 - protein, 114 aa, Artificial Sequence; identical to SEQ ID NO: 1428
  VH-168 Peptide Sequence

SEQ ID NO: 1432 - protein, 114 aa, Artificial Sequence
  VH-169 Peptide Sequence
QIQLVQSGSELKKPGASVKVSCKASGYTFTIFGMNWVRQAPGQGLEWMGWVNTYTGEPTYAQGFTGRFVFSLDTSVSMAYLQISSLKAEDTAVYFCARGWFAYWGQGTLVTVSS

SEQ ID NO: 1433 - protein, 114 aa, Artificial Sequence; identical to SEQ ID NO: 1432
  VH-170 Peptide Sequence

SEQ ID NO: 1434 - protein, 114 aa, Artificial Sequence; identical to SEQ ID NO: 1432
  VH-171 Peptide Sequence

SEQ ID NO: 1435 - protein, 114 aa, Artificial Sequence; identical to SEQ ID NO: 1432
  VH-172 Peptide Sequence

SEQ ID NO: 1436 - protein, 114 aa, Artificial Sequence
  VH-173 Peptide Sequence
QIQLVQSGSELKKPGASVKVSCKASGYTFTIFGMNWVRQAPGQGLEWMGWVNTYTGEPTYADDFTGRFVFSLDTSVSMAYLQISSLKAEDTAVYFCARGWFAYWGQGTLVTVSS

SEQ ID NO: 1437 - protein, 114 aa, Artificial Sequence; identical to SEQ ID NO: 1436
  VH-174 Peptide Sequence

SEQ ID NO: 1438 - protein, 114 aa, Artificial Sequence; identical to SEQ ID NO: 1436
  VH-175 Peptide Sequence

SEQ ID NO: 1439 - protein, 114 aa, Artificial Sequence; identical to SEQ ID NO: 1436
  VH-176 Peptide Sequence

SEQ ID NO: 1440 - protein, 112 aa, Artificial Sequence; identical to SEQ ID NO: 440
  VL-150 Peptide Sequence

SEQ ID NO: 1441 - protein, 112 aa, Artificial Sequence
  VL-151 Peptide Sequence
DIVMTQTPLSLSVTPGQPASISCKSSRSLLDSDGKTYLNWYLQKPGQSPQRLIYLVSKLDSGVPDRFSGSGSGTDFTLKISRVEAEDVGVYYCWQGTHFPQTFGGGTKVEIK

SEQ ID NO: 1442 - protein, 112 aa, Artificial Sequence
  VL-152 Peptide Sequence
DVVMTQTPLSLSVTPGQPASISCKSSRSLLDSDGKTYLNWLLQKPGQSPQRLIYLVSKLDSGVPDRFSGSGSGTDFTLKISRVEAEDVGVYYCWQGTHFPQTFGGGTKVEIK

SEQ ID NO: 1443 - protein, 112 aa, Artificial Sequence
  VL-153 Peptide Sequence
DVVMTQSPLSLPVTLGQPASISCRSSRSLLDSDGKTYLNWFQQRPGQSPRRLIYLVSKLDSGVPDRFSGSGSGTDFTLKISRVEAEDVGVYYCWQGTHFPQTFGGGTKVEIK

SEQ ID NO: 1444 - protein, 112 aa, Artificial Sequence
  VL-154 Peptide Sequence
DVVMTQSPLSLPVTLGQPASISCKSSRSLLDSDGKTYLNWLQQRPGQSPRRLIYLVSKLDSGVPDRFSGSGSGTDFTLKISRVEAEDVGVYYCWQGTHFPQTFGGGTKVEIK

SEQ ID NO: 1445 - protein, 112 aa, Artificial Sequence; identical to SEQ ID NO: 1441
  VL-155 Peptide Sequence

SEQ ID NO: 1446 - protein, 112 aa, Artificial Sequence; identical to SEQ ID NO: 1442
  VL-156 Peptide Sequence

SEQ ID NO: 1447 - protein, 112 aa, Artificial Sequence; identical to SEQ ID NO: 1443
  VL-157 Peptide Sequence

SEQ ID NO: 1448 - protein, 112 aa, Artificial Sequence; identical to SEQ ID NO: 1444
  VL-158 Peptide Sequence

SEQ ID NO: 1449 - protein, 112 aa, Artificial Sequence; identical to SEQ ID NO: 1441
  VL-159 Peptide Sequence

SEQ ID NO: 1450 - protein, 112 aa, Artificial Sequence; identical to SEQ ID NO: 1442
  VL-160 Peptide Sequence

SEQ ID NO: 1451 - protein, 112 aa, Artificial Sequence; identical to SEQ ID NO: 1443
  VL-161 Peptide Sequence

SEQ ID NO: 1452 - protein, 112 aa, Artificial Sequence; identical to SEQ ID NO: 1441
  VL-162 Peptide Sequence

SEQ ID NO: 1453 - protein, 112 aa, Artificial Sequence; identical to SEQ ID NO: 1441
  VL-163 Peptide Sequence

SEQ ID NO: 1454 - protein, 112 aa, Artificial Sequence; identical to SEQ ID NO: 1442
  VL-164 Peptide Sequence

SEQ ID NO: 1455 - protein, 112 aa, Artificial Sequence; identical to SEQ ID NO: 1443
  VL-165 Peptide Sequence

SEQ ID NO: 1456 - protein, 112 aa, Artificial Sequence; identical to SEQ ID NO: 1444
  VL-166 Peptide Sequence

SEQ ID NO: 1457 - protein, 112 aa, Artificial Sequence; identical to SEQ ID NO: 1441
  VL-167 Peptide Sequence

SEQ ID NO: 1458 - protein, 112 aa, Artificial Sequence; identical to SEQ ID NO: 1442
  VL-168 Peptide Sequence

SEQ ID NO: 1459 - protein, 112 aa, Artificial Sequence; identical to SEQ ID NO: 1443
  VL-169 Peptide Sequence

SEQ ID NO: 1460 - protein, 112 aa, Artificial Sequence; identical to SEQ ID NO: 1444
  VL-170 Peptide Sequence

SEQ ID NO: 1461 - protein, 112 aa, Artificial Sequence; identical to SEQ ID NO: 1441
  VL-171 Peptide Sequence

SEQ ID NO: 1462 - protein, 112 aa, Artificial Sequence; identical to SEQ ID NO: 1442
  VL-172 Peptide Sequence

SEQ ID NO: 1463 - protein, 112 aa, Artificial Sequence; identical to SEQ ID NO: 1443
  VL-173 Peptide Sequence

SEQ ID NO: 1464 - protein, 112 aa, Artificial Sequence; identical to SEQ ID NO: 1444
  VL-174 Peptide Sequence

SEQ ID NO: 1465 - protein, 440 aa, Artificial Sequence; identical to SEQ ID NO: 1411
  21H6-H0L0 heavy chain peptide sequence

SEQ ID NO: 1466 - protein, 440 aa, Artificial Sequence
  21H6-H1L1 heavy chain peptide sequence
QVQLVQSGSELKKPGASVKVSCKASGYTFTIFGMNWVRQAPGQGLEWMGWVNTYTGEPTYAQGFTGRFVFSLDTSVSTAYLQISSLKAEDTAVYYCARGWFAYWGQGTLVTVSSASTKGPSVFPLAPCSRSTSESTAALGCLVKDYFPEPVTVSWNSGALTSGVHTFPAVLQSSGLYSLSSVVTVPSSSLGTKTYTCNVDHKPSNTKVDKRVESKYGPPCPPCPAPEFLGGPSVFLFPPKPKDTLMISRTPEVTCVVVDVSQEDPEVQFNWYVDGVEVHNAKTKPREEQFNSTYRVVSVLTVLHQDWLNGKEYKCKVSNKGLPSSIEKTISKAKGQPREPQVYTLPPSQEEMTKNQVSLTCLVKGFYPSDIAVEWESNGQPENNYKTTPPVLDSDGSFFLYSRLTVDKSRWQEGNVFSCSVMHEALHNHYTQKSLSLSLG

SEQ ID NO: 1467 - protein, 440 aa, Artificial Sequence; identical to SEQ ID NO: 1466
  21H6-H1L2 heavy chain peptide sequence

SEQ ID NO: 1468 - protein, 440 aa, Artificial Sequence; identical to SEQ ID NO: 1466
  21H6-H1L3 heavy chain peptide sequence

SEQ ID NO: 1469 - protein, 440 aa, Artificial Sequence; identical to SEQ ID NO: 1466
  21H6-H1L4 heavy chain peptide sequence

SEQ ID NO: 1470 - protein, 440 aa, Artificial Sequence
  21H6-H2L1 heavy chain peptide sequence
QIQLVQSGSELKKPGASVKVSCKASGYTFTIFGMNWVRQAPGQGLEWMGWVNTYTGEPTYAQGFTGRFVFSLDTSVSTAYLQISSLKAEDTAVYFCARGWFAYWGQGTLVTVSSASTKGPSVFPLAPCSRSTSESTAALGCLVKDYFPEPVTVSWNSGALTSGVHTFPAVLQSSGLYSLSSVVTVPSSSLGTKTYTCNVDHKPSNTKVDKRVESKYGPPCPPCPAPEFLGGPSVFLFPPKPKDTLMISRTPEVTCVVVDVSQEDPEVQFNWYVDGVEVHNAKTKPREEQFNSTYRVVSVLTVLHQDWLNGKEYKCKVSNKGLPSSIEKTISKAKGQPREPQVYTLPPSQEEMTKNQVSLTCLVKGFYPSDIAVEWESNGQPENNYKTTPPVLDSDGSFFLYSRLTVDKSRWQEGNVFSCSVMHEALHNHYTQKSLSLSLG

SEQ ID NO: 1471 - protein, 440 aa, Artificial Sequence; identical to SEQ ID NO: 1470
  21H6-H2L2 heavy chain peptide sequence

SEQ ID NO: 1472 - protein, 440 aa, Artificial Sequence; identical to SEQ ID NO: 1470
  21H6-H2L3 heavy chain peptide sequence

SEQ ID NO: 1473 - protein, 440 aa, Artificial Sequence; identical to SEQ ID NO: 1470
  21H6-H2L4 heavy chain peptide sequence

SEQ ID NO: 1474 - protein, 440 aa, Artificial Sequence
  21H6-H3L1 heavy chain peptide sequence
QIQLVQSGSELKKPGASVKVSCKASGYTFTIFGMNWVRQAPGQGLEWMGWVNTYTGEPTYADDFTGRFVFSLDTSVSTAYLQISSLKAEDTAVYFCARGWFAYWGQGTLVTVSSASTKGPSVFPLAPCSRSTSESTAALGCLVKDYFPEPVTVSWNSGALTSGVHTFPAVLQSSGLYSLSSVVTVPSSSLGTKTYTCNVDHKPSNTKVDKRVESKYGPPCPPCPAPEFLGGPSVFLFPPKPKDTLMISRTPEVTCVVVDVSQEDPEVQFNWYVDGVEVHNAKTKPREEQFNSTYRVVSVLTVLHQDWLNGKEYKCKVSNKGLPSSIEKTISKAKGQPREPQVYTLPPSQEEMTKNQVSLTCLVKGFYPSDIAVEWESNGQPENNYKTTPPVLDSDGSFFLYSRLTVDKSRWQEGNVFSCSVMHEALHNHYTQKSLSLSLG

SEQ ID NO: 1475 - protein, 440 aa, Artificial Sequence; identical to SEQ ID NO: 1474
  21H6-H3L2 heavy chain peptide sequence

SEQ ID NO: 1476 - protein, 440 aa, Artificial Sequence; identical to SEQ ID NO: 1474
  21H6-H3L3 heavy chain peptide sequence

SEQ ID NO: 1477 - protein, 440 aa, Artificial Sequence; identical to SEQ ID NO: 1474
  21H6-H3L4 heavy chain peptide sequence

SEQ ID NO: 1478 - protein, 440 aa, Artificial Sequence
  21H6-H4L1 heavy chain peptide sequence
QVQLVQSGSELKKPGASVKVSCKASGYTFTIFGMNWVRQAPGQGLEWMGWVNTYTGEPTYAQGFTGRFVFSLDTSVSMAYLQISSLKAEDTAVYYCARGWFAYWGQGTLVTVSSASTKGPSVFPLAPCSRSTSESTAALGCLVKDYFPEPVTVSWNSGALTSGVHTFPAVLQSSGLYSLSSVVTVPSSSLGTKTYTCNVDHKPSNTKVDKRVESKYGPPCPPCPAPEFLGGPSVFLFPPKPKDTLMISRTPEVTCVVVDVSQEDPEVQFNWYVDGVEVHNAKTKPREEQFNSTYRVVSVLTVLHQDWLNGKEYKCKVSNKGLPSSIEKTISKAKGQPREPQVYTLPPSQEEMTKNQVSLTCLVKGFYPSDIAVEWESNGQPENNYKTTPPVLDSDGSFFLYSRLTVDKSRWQEGNVFSCSVMHEALHNHYTQKSLSLSLG

SEQ ID NO: 1479 - protein, 440 aa, Artificial Sequence; identical to SEQ ID NO: 1478
  21H6-H4L2 heavy chain peptide sequence

SEQ ID NO: 1480 - protein, 440 aa, Artificial Sequence; identical to SEQ ID NO: 1478
  21H6-H4L3 heavy chain peptide sequence

SEQ ID NO: 1481 - protein, 440 aa, Artificial Sequence; identical to SEQ ID NO: 1478
  21H6-H4L4 heavy chain peptide sequence

SEQ ID NO: 1482 - protein, 440 aa, Artificial Sequence
  21H6-H5L1 heavy chain peptide sequence
QIQLVQSGSELKKPGASVKVSCKASGYTFTIFGMNWVRQAPGQGLEWMGWVNTYTGEPTYAQGFTGRFVFSLDTSVSMAYLQISSLKAEDTAVYFCARGWFAYWGQGTLVTVSSASTKGPSVFPLAPCSRSTSESTAALGCLVKDYFPEPVTVSWNSGALTSGVHTFPAVLQSSGLYSLSSVVTVPSSSLGTKTYTCNVDHKPSNTKVDKRVESKYGPPCPPCPAPEFLGGPSVFLFPPKPKDTLMISRTPEVTCVVVDVSQEDPEVQFNWYVDGVEVHNAKTKPREEQFNSTYRVVSVLTVLHQDWLNGKEYKCKVSNKGLPSSIEKTISKAKGQPREPQVYTLPPSQEEMTKNQVSLTCLVKGFYPSDIAVEWESNGQPENNYKTTPPVLDSDGSFFLYSRLTVDKSRWQEGNVFSCSVMHEALHNHYTQKSLSLSLG

SEQ ID NO: 1483 - protein, 440 aa, Artificial Sequence; identical to SEQ ID NO: 1482
  21H6-H5L2 heavy chain peptide sequence

SEQ ID NO: 1484 - protein, 440 aa, Artificial Sequence; identical to SEQ ID NO: 1482
  21H6-H5L3 heavy chain peptide sequence

SEQ ID NO: 1485 - protein, 440 aa, Artificial Sequence; identical to SEQ ID NO: 1482
  21H6-H5L4 heavy chain peptide sequence

SEQ ID NO: 1486 - protein, 440 aa, Artificial Sequence
  21H6-H6L1 heavy chain peptide sequence
QIQLVQSGSELKKPGASVKVSCKASGYTFTIFGMNWVRQAPGQGLEWMGWVNTYTGEPTYADDFTGRFVFSLDTSVSMAYLQISSLKAEDTAVYFCARGWFAYWGQGTLVTVSSASTKGPSVFPLAPCSRSTSESTAALGCLVKDYFPEPVTVSWNSGALTSGVHTFPAVLQSSGLYSLSSVVTVPSSSLGTKTYTCNVDHKPSNTKVDKRVESKYGPPCPPCPAPEFLGGPSVFLFPPKPKDTLMISRTPEVTCVVVDVSQEDPEVQFNWYVDGVEVHNAKTKPREEQFNSTYRVVSVLTVLHQDWLNGKEYKCKVSNKGLPSSIEKTISKAKGQPREPQVYTLPPSQEEMTKNQVSLTCLVKGFYPSDIAVEWESNGQPENNYKTTPPVLDSDGSFFLYSRLTVDKSRWQEGNVFSCSVMHEALHNHYTQKSLSLSLG

SEQ ID NO: 1487 - protein, 440 aa, Artificial Sequence; identical to SEQ ID NO: 1486
  21H6-H6L2 heavy chain peptide sequence

SEQ ID NO: 1488 - protein, 440 aa, Artificial Sequence; identical to SEQ ID NO: 1486
  21H6-H6L3 heavy chain peptide sequence

SEQ ID NO: 1489 - protein, 440 aa, Artificial Sequence; identical to SEQ ID NO: 1486
  21H6-H6L4 heavy chain peptide sequence

SEQ ID NO: 1490 - protein, 219 aa, Artificial Sequence; identical to SEQ ID NO: 1412
  21H6-H0L0 light chain peptide sequence

SEQ ID NO: 1491 - protein, 219 aa, Artificial Sequence
  21H6-H1L1 light chain peptide sequence
DIVMTQTPLSLSVTPGQPASISCKSSRSLLDSDGKTYLNWYLQKPGQSPQRLIYLVSKLDSGVPDRFSGSGSGTDFTLKISRVEAEDVGVYYCWQGTHFPQTFGGGTKVEIKRTVAAPSVFIFPPSDEQLKSGTASVVCLLNNFYPREAKVQWKVDNALQSGNSQESVTEQDSKDSTYSLSSTLTLSKADYEKHKVYACEVTHQGLSSPVTKSFNRGEC

SEQ ID NO: 1492 - protein, 219 aa, Artificial Sequence
  21H6-H1L2 light chain peptide sequence
DVVMTQTPLSLSVTPGQPASISCKSSRSLLDSDGKTYLNWLLQKPGQSPQRLIYLVSKLDSGVPDRFSGSGSGTDFTLKISRVEAEDVGVYYCWQGTHFPQTFGGGTKVEIKRTVAAPSVFIFPPSDEQLKSGTASVVCLLNNFYPREAKVQWKVDNALQSGNSQESVTEQDSKDSTYSLSSTLTLSKADYEKHKVYACEVTHQGLSSPVTKSFNRGEC

SEQ ID NO: 1493 - protein, 219 aa, Artificial Sequence
  21H6-H1L3 light chain peptide sequence
DVVMTQSPLSLPVTLGQPASISCRSSRSLLDSDGKTYLNWFQQRPGQSPRRLIYLVSKLDSGVPDRFSGSGSGTDFTLKISRVEAEDVGVYYCWQGTHFPQTFGGGTKVEIKRTVAAPSVFIFPPSDEQLKSGTASVVCLLNNFYPREAKVQWKVDNALQSGNSQESVTEQDSKDSTYSLSSTLTLSKADYEKHKVYACEVTHQGLSSPVTKSFNRGEC

SEQ ID NO: 1494 - protein, 219 aa, Artificial Sequence
  21H6-H1L4 light chain peptide sequence
DVVMTQSPLSLPVTLGQPASISCKSSRSLLDSDGKTYLNWLQQRPGQSPRRLIYLVSKLDSGVPDRFSGSGSGTDFTLKISRVEAEDVGVYYCWQGTHFPQTFGGGTKVEIKRTVAAPSVFIFPPSDEQLKSGTASVVCLLNNFYPREAKVQWKVDNALQSGNSQESVTEQDSKDSTYSLSSTLTLSKADYEKHKVYACEVTHQGLSSPVTKSFNRGEC

SEQ ID NO: 1495 - protein, 219 aa, Artificial Sequence; identical to SEQ ID NO: 1491
  21H6-H2L1 light chain peptide sequence

SEQ ID NO: 1496 - protein, 219 aa, Artificial Sequence; identical to SEQ ID NO: 1492
  21H6-H2L2 light chain peptide sequence

SEQ ID NO: 1497 - protein, 219 aa, Artificial Sequence; identical to SEQ ID NO: 1493
  21H6-H2L3 light chain peptide sequence

SEQ ID NO: 1498 - protein, 219 aa, Artificial Sequence; identical to SEQ ID NO: 1494
  21H6-H2L4 light chain peptide sequence

SEQ ID NO: 1499 - protein, 219 aa, Artificial Sequence; identical to SEQ ID NO: 1491
  21H6-H3L1 light chain peptide sequence

SEQ ID NO: 1500 - protein, 219 aa, Artificial Sequence; identical to SEQ ID NO: 1492
  21H6-H3L2 light chain peptide sequence

SEQ ID NO: 1501 - protein, 219 aa, Artificial Sequence; identical to SEQ ID NO: 1493
  21H6-H3L3 light chain peptide sequence

SEQ ID NO: 1502 - protein, 219 aa, Artificial Sequence; identical to SEQ ID NO: 1491
  21H6-H3L4 light chain peptide sequence

SEQ ID NO: 1503 - protein, 219 aa, Artificial Sequence; identical to SEQ ID NO: 1491
  21H6-H4L1 light chain peptide sequence

SEQ ID NO: 1504 - protein, 219 aa, Artificial Sequence; identical to SEQ ID NO: 1492
  21H6-H4L2 light chain peptide sequence

SEQ ID NO: 1505 - protein, 219 aa, Artificial Sequence; identical to SEQ ID NO: 1493
  21H6-H4L3 light chain peptide sequence

SEQ ID NO: 1506 - protein, 219 aa, Artificial Sequence; identical to SEQ ID NO: 1494
  21H6-H4L4 light chain peptide sequence

SEQ ID NO: 1507 - protein, 219 aa, Artificial Sequence; identical to SEQ ID NO: 1491
  21H6-H5L1 light chain peptide sequence

SEQ ID NO: 1508 - protein, 219 aa, Artificial Sequence; identical to SEQ ID NO: 1492
  21H6-H5L2 light chain peptide sequence

SEQ ID NO: 1509 - protein, 219 aa, Artificial Sequence; identical to SEQ ID NO: 1493
  21H6-H5L3 light chain peptide sequence

SEQ ID NO: 1510 - protein, 219 aa, Artificial Sequence; identical to SEQ ID NO: 1494
  21H6-H5L4 light chain peptide sequence

SEQ ID NO: 1511 - protein, 219 aa, Artificial Sequence; identical to SEQ ID NO: 1491
  21H6-H6L1 light chain peptide sequence

SEQ ID NO: 1512 - protein, 219 aa, Artificial Sequence; identical to SEQ ID NO: 1492
  21H6-H6L2 light chain peptide sequence

SEQ ID NO: 1513 - protein, 219 aa, Artificial Sequence; identical to SEQ ID NO: 1493
  21H6-H6L3 light chain peptide sequence

SEQ ID NO: 1514 - protein, 219 aa, Artificial Sequence; identical to SEQ ID NO: 1494
  21H6-H6L4 light chain peptide sequence

SEQ ID NO: 1515 - DNA, 342 bp, Artificial Sequence
  21H6-H0L0 VH DNA sequence
cagatccagcttgtacagtctgggcctgaacttaaaaagcccggggaaacagtgaagatctcctgtaaggcttctgggtacacttttacgatctttggaatgaactgggtcaagcaggctcccggaaaaggtctgaagtggatgggctgggtgaatacatacacgggggaacccacctatgctgacgattttaaggggcggttcgctttctctctcgaaaccagcgcgagtacagcatacttacagatcaacaacttgaagaacgaagatacagctacgtatttctgtgctagagggtggttcgcgtattgggggcaaggcactctcgtcaccgtatccgcc

SEQ ID NO: 1516 - DNA, 342 bp, Artificial Sequence
  21H6-H1L1 VH DNA sequence
caggtgcagctcgtacaaagcgggtcagagttaaagaagcctggggccagtgtgaaagtcagttgcaaagcgtccggttacactttcacaatcttcggaatgaactgggtgcgccaggctcccggccaaggattggagtggatgggatgggtcaatacatacaccggcgagcctacttatgcccagggttttaccgggaggtttgtgttctccttagatacatccgtgagtacggcttatctgcaaatctcttctctcaaggcggaagacactgcggtatattactgtgcgcggggatggttcgcatactggggacaaggcaccctcgtgaccgtgagcagc

SEQ ID NO: 1517 - DNA, 342 bp, Artificial Sequence; identical to SEQ ID NO: 1516
  21H6-H1L2 VH DNA sequence

SEQ ID NO: 1518 - DNA, 342 bp, Artificial Sequence; identical to SEQ ID NO: 1516
  21H6-H1L3 VH DNA sequence

SEQ ID NO: 1519 - DNA, 342 bp, Artificial Sequence; identical to SEQ ID NO: 1516
  21H6-H1L4 VH DNA sequence

SEQ ID NO: 1520 - DNA, 342 bp, Artificial Sequence
  21H6-H2L1 VH DNA sequence
cagatccagcttgtccagtctggatccgagttaaaaaaacctggcgccagcgttaaggtttcctgcaaagcaagtggttacacgtttacaatcttcggaatgaattgggtgcgtcaagctcccggacaaggactcgaatggatgggatgggtgaacacatacacgggcgagcctacctacgctcagggcttcacaggccgatttgtgttctccctggacacgagcgtctccactgcatatttgcaaatatccagtcttaaggcagaggacaccgctgtgtatttttgtgcacgagggtggtttgcctattggggccagggaacactggttactgtctcaagt

SEQ ID NO: 1521 - DNA, 342 bp, Artificial Sequence; identical to SEQ ID NO: 1520
  21H6-H2L2 VH DNA sequence

SEQ ID NO: 1522 - DNA, 342 bp, Artificial Sequence; identical to SEQ ID NO: 1520
  21H6-H2L3 VH DNA sequence

SEQ ID NO: 1523 - DNA, 342 bp, Artificial Sequence; identical to SEQ ID NO: 1520
  21H6-H2L4 VH DNA sequence

SEQ ID NO: 1524 - DNA, 342 bp, Artificial Sequence
  21H6-H3L1 VH DNA sequence
cagattcagctggtgcagagcggctcagaacttaagaagcccggcgccagtgtgaaagtgagttgtaaggccagcggatacactttcactatctttggcatgaattgggtgcggcaggcccccggtcagggactggagtggatggggtgggtgaatacatacactggagaacctacctacgcggacgacttcacaggacggttcgtcttctccttagacacctctgtcagcacagcttacctccagattagttccctgaaggctgaagatacggcagtatacttttgcgctagaggctggtttgcctactgggggcagggtacgcttgtgacagtgtcttct

SEQ ID NO: 1525 - DNA, 342 bp, Artificial Sequence; identical to SEQ ID NO: 1524
  21H6-H3L2 VH DNA sequence

SEQ ID NO: 1526 - DNA, 342 bp, Artificial Sequence; identical to SEQ ID NO: 1524
  21H6-H3L3 VH DNA sequence

SEQ ID NO: 1527 - DNA, 342 bp, Artificial Sequence; identical to SEQ ID NO: 1524
  21H6-H3L4 VH DNA sequence

SEQ ID NO: 1528 - DNA, 342 bp, Artificial Sequence
  21H6-H4L1 VH DNA sequence
caggtgcaactcgtccagtcagggtccgagctgaagaaacccggagcgtccgtgaaggtgtcctgtaaagcctctggctacacattcaccatattcgggatgaactgggtgcgtcaggccccagggcagggattagagtggatgggttgggtgaacacctacacaggggagccaacttacgcccaggggttcacgggcagatttgtatttagcctcgacacctccgtttcaatggcctatctccagatttcaagccttaaagctgaggacactgctgtgtactactgcgcccgcggttggtttgcatactggggccagggaacccttgtcaccgtgtcttcc

SEQ ID NO: 1529 - DNA, 342 bp, Artificial Sequence; identical to SEQ ID NO: 1528
  21H6-H4L2 VH DNA sequence

SEQ ID NO: 1530 - DNA, 342 bp, Artificial Sequence; identical to SEQ ID NO: 1528
  21H6-H4L3 VH DNA sequence

SEQ ID NO: 1531 - DNA, 342 bp, Artificial Sequence; identical to SEQ ID NO: 1528
  21H6-H4L4 VH DNA sequence

SEQ ID NO: 1532 - DNA, 342 bp, Artificial Sequence
  21H6-H5L1 VH DNA sequence
cagatccagttggtccagtccggaagtgagctgaagaagcctggtgccagtgtcaaagtttcctgcaaagcctctggatataccttcaccattttcggtatgaactgggtccgacaagctccggggcaggggctcgaatggatggggtgggtgaatacatacacaggcgaaccaacatacgcacagggatttacaggtcggttcgtcttttccctggacacatctgtttccatggcctatctgcagatctctagcctgaaggctgaagataccgccgtatatttctgtgcacgggggtggttcgcctactgggggcagggcacccttgtgactgtgtctagc

SEQ ID NO: 1533 - DNA, 342 bp, Artificial Sequence; identical to SEQ ID NO: 1532
  21H6-H5L2 VH DNA sequence

SEQ ID NO: 1534 - DNA, 342 bp, Artificial Sequence; identical to SEQ ID NO: 1532
  21H6-H5L3 VH DNA sequence

SEQ ID NO: 1535 - DNA, 342 bp, Artificial Sequence; identical to SEQ ID NO: 1532
  21H6-H5L4 VH DNA sequence

SEQ ID NO: 1536 - DNA, 342 bp, Artificial Sequence
  21H6-H6L1 VH DNA sequence
cagatccagctggtccagagtggctccgagctgaaaaagcctggagcttctgtgaaagtctcctgcaaagcttctggctacacatttactatctttgggatgaactgggtaaggcaggccccaggccaaggactggagtggatgggctgggttaatacctacacaggcgagcccacgtacgctgacgacttcacagggaggtttgtgttttccctggatacctccgttagcatggcctatttgcagattagttccctgaaggcagaggatactgccgtgtacttttgtgcacgaggatggtttgcctattggggccagggtaccttggtgaccgtctccagc

SEQ ID NO: 1537 - DNA, 342 bp, Artificial Sequence; identical to SEQ ID NO: 1536
  21H6-H6L2 VH DNA sequence

SEQ ID NO: 1538 - DNA, 342 bp, Artificial Sequence; identical to SEQ ID NO: 1536
  21H6-H6L3 VH DNA sequence

SEQ ID NO: 1539 - DNA, 342 bp, Artificial Sequence; identical to SEQ ID NO: 1536
  21H6-H6L4 VH DNA sequence

SEQ ID NO: 1540 - DNA, 336 bp, Artificial Sequence
  21H6-H0L0 VL DNA sequence
gatgtcgttatgactcagaccccactcacgctctcagtgaccatcggacagcctgccagcatctcatgtaaaagtagtcgcagcctgttagattctgacggcaagacctatctgaactggctgctgcagcgtcctggccagagcccaaaaaggctgatctatctcgtctcaaagctggattcaggagtccccgatcggtttacgggtagcggatctggcaccgacttcacactgaagatttctcgggttgaagccgaagatttgggcgtctactattgctggcaaggaacacacttccctcagacctttggcggcggcacaaagctggaaattaat

SEQ ID NO: 1541 - DNA, 336 bp, Artificial Sequence
  21H6-H1L1 VL DNA sequence
gatatagtgatgacacagacccccctgtctctctcagttacccccggacaacccgcctctatcagttgcaagagtagtcgctctctgctcgattccgacggaaagacttatctgaattggtatttacaaaaacctgggcagagtccccagcgccttatatatctcgtgtccaaactcgatagcggcgtgcctgaccggttcagcggttcaggctccgggaccgactttacactgaagattagtagggtcgaggcagaagacgtcggtgtttattactgttggcagggcacccatttccctcagacgtttggcggaggtaccaaggtagagataaag

SEQ ID NO: 1542 - DNA, 336 bp, Artificial Sequence
  21H6-H1L2 VL DNA sequence
gatgtggtgatgactcagactcctctgagcctgtccgtgaccccaggacaacctgcttccatttcctgtaaatcctcccgttccttattggatagcgacgggaagacatacctgaactggctgctgcagaaacccgggcagtccccgcagagattaatatatctggtatctaagctggatagtggtgtaccagatcggtttagcggatccggctcaggtaccgacttcacgctcaagatctccagggtggaggctgaggatgtaggagtatactactgttggcaggggacccattttcctcaaacatttggggggggaacaaaggtagagatcaag

SEQ ID NO: 1543 - DNA, 336 bp, Artificial Sequence
  21H6-H1L3 VL DNA sequence
gatgtggtgatgactcagtctccactcagcctgcctgtaaccttagggcaacctgcctccatcagttgtcgctccagtcgttctctgctggattcagacggtaaaacctatctgaattggttccagcagcgtccaggacagtctccacgccgactgatatatctcgtgagtaagttggattcaggcgtgcccgatcgcttcagtggcagcgggtctgggactgactttaccctgaaaatatcccgcgtggaggcggaagatgtcggggtatattactgttggcagggtacacatttcccacagacattcgggggaggcactaaggtggaaattaaa

SEQ ID NO: 1544 - DNA, 336 bp, Artificial Sequence
  21H6-H1L4 VL DNA sequence
gacgtggtgatgacacagagcccgctgtctctcccggtaacgctgggccagccggcgtctattagctgtaagagtagccgaagtctccttgatagcgacggaaaaacctatctgaactggcttcagcaacgccctgggcagtccccccgccgcctgatttatctggtgtccaaactggacagcggcgtgcccgacaggttctccgggagcggtagcggtactgactttacgctcaagatttcccgcgtggaggccgaggatgtcggggtatattactgctggcaggggacgcattttccgcagacctttggcggaggcaccaaagtggagatcaaa

SEQ ID NO: 1545 - DNA, 336 bp, Artificial Sequence; identical to SEQ ID NO: 1541
  21H6-H2L1 VL DNA sequence

SEQ ID NO: 1546 - DNA, 336 bp, Artificial Sequence; identical to SEQ ID NO: 1542
  21H6-H2L2 VL DNA sequence

SEQ ID NO: 1547 - DNA, 336 bp, Artificial Sequence; identical to SEQ ID NO: 1543
  21H6-H2L3 VL DNA sequence

SEQ ID NO: 1548 - DNA, 336 bp, Artificial Sequence; identical to SEQ ID NO: 1544
  21H6-H2L4 VL DNA sequence

SEQ ID NO: 1549 - DNA, 336 bp, Artificial Sequence; identical to SEQ ID NO: 1541
  21H6-H3L1 VL DNA sequence

SEQ ID NO: 1550 - DNA, 336 bp, Artificial Sequence; identical to SEQ ID NO: 1542
  21H6-H3L2 VL DNA sequence

SEQ ID NO: 1551 - DNA, 336 bp, Artificial Sequence; identical to SEQ ID NO: 1543
  21H6-H3L3 VL DNA sequence

SEQ ID NO: 1552 - DNA, 336 bp, Artificial Sequence; identical to SEQ ID NO: 1544
  21H6-H3L4 VL DNA sequence

SEQ ID NO: 1553 - DNA, 336 bp, Artificial Sequence; identical to SEQ ID NO: 1541
  21H6-H4L1 VL DNA sequence

SEQ ID NO: 1554 - DNA, 336 bp, Artificial Sequence; identical to SEQ ID NO: 1542
  21H6-H4L2 VL DNA sequence

SEQ ID NO: 1555 - DNA, 336 bp, Artificial Sequence; identical to SEQ ID NO: 1543
  21H6-H4L3 VL DNA sequence

SEQ ID NO: 1556 - DNA, 336 bp, Artificial Sequence; identical to SEQ ID NO: 1544
  21H6-H4L4 VL DNA sequence

SEQ ID NO: 1557 - DNA, 336 bp, Artificial Sequence; identical to SEQ ID NO: 1541
  21H6-H5L1 VL DNA sequence

SEQ ID NO: 1558 - DNA, 336 bp, Artificial Sequence; identical to SEQ ID NO: 1542
  21H6-H5L2 VL DNA sequence

SEQ ID NO: 1559 - DNA, 336 bp, Artificial Sequence; identical to SEQ ID NO: 1543
  21H6-H5L3 VL DNA sequence

SEQ ID NO: 1560 - DNA, 336 bp, Artificial Sequence; identical to SEQ ID NO: 1544
  21H6-H5L4 VL DNA sequence

SEQ ID NO: 1561 - DNA, 336 bp, Artificial Sequence; identical to SEQ ID NO: 1541
  21H6-H6L1 VL DNA sequence

SEQ ID NO: 1562 - DNA, 336 bp, Artificial Sequence; identical to SEQ ID NO: 1542
  21H6-H6L2 VL DNA sequence

SEQ ID NO: 1563 - DNA, 336 bp, Artificial Sequence; identical to SEQ ID NO: 1543
  21H6-H6L3 VL DNA sequence

SEQ ID NO: 1564 - DNA, 336 bp, Artificial Sequence; identical to SEQ ID NO: 1544
  21H6-H6L4 VL DNA sequence

SEQ ID NO: 1565 - DNA, 1326 bp, Artificial Sequence
  21H6-H0L0 heavy chain DNA sequence
cagatccagcttgtacagtctgggcctgaacttaaaaagcccggggaaacagtgaagatctcctgtaaggcttctgggtacacttttacgatctttggaatgaactgggtcaagcaggctcccggaaaaggtctgaagtggatgggctgggtgaatacatacacgggggaacccacctatgctgacgattttaaggggcggttcgctttctctctcgaaaccagcgcgagtacagcatacttacagatcaacaacttgaagaacgaagatacagctacgtatttctgtgctagagggtggttcgcgtattgggggcaaggcactctcgtcaccgtatccgccgctagcaccaagggccccagcgtgtttcctctcgctccctgcagccggagcacatccgagagcaccgctgctctgggctgtctcgtgaaggactacttccctgaacccgtcaccgtcagctggaatagcggcgccctgacatccggcgtccacacattccccgctgtcctgcagagcagcggcctgtacagcctgagctccgtggtcaccgtgcctagcagcagcctgggaacaaagacctacacctgcaacgtggaccataagccctccaacaccaaggtggacaagcgggtggaatccaagtatggacccccctgtcctccttgccctgctcctgaatttctcggaggcccctccgtcttcctgtttccccccaagcccaaggacaccctgatgatctcccggacacccgaagtcacctgcgtcgtggtggatgtcagccaggaagatcccgaggtgcagttcaactggtacgtggacggagtggaggtgcataacgccaaaaccaagcccagggaagagcagttcaacagcacctatcgggtcgtgtccgtgctcaccgtcctgcatcaggattggctcaacggcaaggagtacaagtgcaaggtgtccaacaagggcctgccctcctccatcgagaagaccatctccaaggctaagggccaacctcgggagccccaagtgtataccctccctcccagccaggaggagatgaccaagaatcaagtgagcctgacctgcctcgtgaagggattttacccctccgacatcgctgtggaatgggaaagcaatggccaacctgagaacaactacaagaccacaccccccgtgctggactccgatggctccttcttcctgtacagcaggctgaccgtggacaaatcccggtggcaagagggaaacgtgttcagctgctccgtgatgcacgaggctctccacaaccactacacccagaagagcctctccctgagcctcggctagtaa

SEQ ID NO: 1566 - DNA, 1326 bp, Artificial Sequence
  21H6-H1L1 heavy chain DNA sequence
caggtgcagctcgtacaaagcgggtcagagttaaagaagcctggggccagtgtgaaagtcagttgcaaagcgtccggttacactttcacaatcttcggaatgaactgggtgcgccaggctcccggccaaggattggagtggatgggatgggtcaatacatacaccggcgagcctacttatgcccagggttttaccgggaggtttgtgttctccttagatacatccgtgagtacggcttatctgcaaatctcttctctcaaggcggaagacactgcggtatattactgtgcgcggggatggttcgcatactggggacaaggcaccctcgtgaccgtgagcagcgctagcaccaagggccccagcgtgtttcctctcgctccctgcagccggagcacatccgagagcaccgctgctctgggctgtctcgtgaaggactacttccctgaacccgtcaccgtcagctggaatagcggcgccctgacatccggcgtccacacattccccgctgtcctgcagagcagcggcctgtacagcctgagctccgtggtcaccgtgcctagcagcagcctgggaacaaagacctacacctgcaacgtggaccataagccctccaacaccaaggtggacaagcgggtggaatccaagtatggacccccctgtcctccttgccctgctcctgaatttctcggaggcccctccgtcttcctgtttccccccaagcccaaggacaccctgatgatctcccggacacccgaagtcacctgcgtcgtggtggatgtcagccaggaagatcccgaggtgcagttcaactggtacgtggacggagtggaggtgcataacgccaaaaccaagcccagggaagagcagttcaacagcacctatcgggtcgtgtccgtgctcaccgtcctgcatcaggattggctcaacggcaaggagtacaagtgcaaggtgtccaacaagggcctgccctcctccatcgagaagaccatctccaaggctaagggccaacctcgggagccccaagtgtataccctccctcccagccaggaggagatgaccaagaatcaagtgagcctgacctgcctcgtgaagggattttacccctccgacatcgctgtggaatgggaaagcaatggccaacctgagaacaactacaagaccacaccccccgtgctggactccgatggctccttcttcctgtacagcaggctgaccgtggacaaatcccggtggcaagagggaaacgtgttcagctgctccgtgatgcacgaggctctccacaaccactacacccagaagagcctctccctgagcctcggctagtaa

SEQ ID NO: 1567 - DNA, 1326 bp, Artificial Sequence; identical to SEQ ID NO: 1566
  21H6-H1L2 heavy chain DNA sequence

SEQ ID NO: 1568 - DNA, 1326 bp, Artificial Sequence; identical to SEQ ID NO: 1566
  21H6-H1L3 heavy chain DNA sequence

SEQ ID NO: 1569 - DNA, 1326 bp, Artificial Sequence; identical to SEQ ID NO: 1566
  21H6-H1L4 heavy chain DNA sequence

SEQ ID NO: 1570 - DNA, 1326 bp, Artificial Sequence
  21H6-H2L1 heavy chain DNA sequence
cagatccagcttgtccagtctggatccgagttaaaaaaacctggcgccagcgttaaggtttcctgcaaagcaagtggttacacgtttacaatcttcggaatgaattgggtgcgtcaagctcccggacaaggactcgaatggatgggatgggtgaacacatacacgggcgagcctacctacgctcagggcttcacaggccgatttgtgttctccctggacacgagcgtctccactgcatatttgcaaatatccagtcttaaggcagaggacaccgctgtgtatttttgtgcacgagggtggtttgcctattggggccagggaacactggttactgtctcaagtgctagcaccaagggccccagcgtgtttcctctcgctccctgcagccggagcacatccgagagcaccgctgctctgggctgtctcgtgaaggactacttccctgaacccgtcaccgtcagctggaatagcggcgccctgacatccggcgtccacacattccccgctgtcctgcagagcagcggcctgtacagcctgagctccgtggtcaccgtgcctagcagcagcctgggaacaaagacctacacctgcaacgtggaccataagccctccaacaccaaggtggacaagcgggtggaatccaagtatggacccccctgtcctccttgccctgctcctgaatttctcggaggcccctccgtcttcctgtttccccccaagcccaaggacaccctgatgatctcccggacacccgaagtcacctgcgtcgtggtggatgtcagccaggaagatcccgaggtgcagttcaactggtacgtggacggagtggaggtgcataacgccaaaaccaagcccagggaagagcagttcaacagcacctatcgggtcgtgtccgtgctcaccgtcctgcatcaggattggctcaacggcaaggagtacaagtgcaaggtgtccaacaagggcctgccctcctccatcgagaagaccatctccaaggctaagggccaacctcgggagccccaagtgtataccctccctcccagccaggaggagatgaccaagaatcaagtgagcctgacctgcctcgtgaagggattttacccctccgacatcgctgtggaatgggaaagcaatggccaacctgagaacaactacaagaccacaccccccgtgctggactccgatggctccttcttcctgtacagcaggctgaccgtggacaaatcccggtggcaagagggaaacgtgttcagctgctccgtgatgcacgaggctctccacaaccactacacccagaagagcctctccctgagcctcggctagtaa

SEQ ID NO: 1571 - DNA, 1326 bp, Artificial Sequence; identical to SEQ ID NO: 1570
  21H6-H2L2 heavy chain DNA sequence

SEQ ID NO: 1572 - DNA, 1326 bp, Artificial Sequence; identical to SEQ ID NO: 1570
  21H6-H2L3 heavy chain DNA sequence

SEQ ID NO: 1573 - DNA, 1326 bp, Artificial Sequence; identical to SEQ ID NO: 1570
  21H6-H2L4 heavy chain DNA sequence

SEQ ID NO: 1574 - DNA, 1326 bp, Artificial Sequence
  21H6-H3L1 heavy chain DNA sequence
cagattcagctggtgcagagcggctcagaacttaagaagcccggcgccagtgtgaaagtgagttgtaaggccagcggatacactttcactatctttggcatgaattgggtgcggcaggcccccggtcagggactggagtggatggggtgggtgaatacatacactggagaacctacctacgcggacgacttcacaggacggttcgtcttctccttagacacctctgtcagcacagcttacctccagattagttccctgaaggctgaagatacggcagtatacttttgcgctagaggctggtttgcctactgggggcagggtacgcttgtgacagtgtcttctgctagcaccaagggccccagcgtgtttcctctcgctccctgcagccggagcacatccgagagcaccgctgctctgggctgtctcgtgaaggactacttccctgaacccgtcaccgtcagctggaatagcggcgccctgacatccggcgtccacacattccccgctgtcctgcagagcagcggcctgtacagcctgagctccgtggtcaccgtgcctagcagcagcctgggaacaaagacctacacctgcaacgtggaccataagccctccaacaccaaggtggacaagcgggtggaatccaagtatggacccccctgtcctccttgccctgctcctgaatttctcggaggcccctccgtcttcctgtttccccccaagcccaaggacaccctgatgatctcccggacacccgaagtcacctgcgtcgtggtggatgtcagccaggaagatcccgaggtgcagttcaactggtacgtggacggagtggaggtgcataacgccaaaaccaagcccagggaagagcagttcaacagcacctatcgggtcgtgtccgtgctcaccgtcctgcatcaggattggctcaacggcaaggagtacaagtgcaaggtgtccaacaagggcctgccctcctccatcgagaagaccatctccaaggctaagggccaacctcgggagccccaagtgtataccctccctcccagccaggaggagatgaccaagaatcaagtgagcctgacctgcctcgtgaagggattttacccctccgacatcgctgtggaatgggaaagcaatggccaacctgagaacaactacaagaccacaccccccgtgctggactccgatggctccttcttcctgtacagcaggctgaccgtggacaaatcccggtggcaagagggaaacgtgttcagctgctccgtgatgcacgaggctctccacaaccactacacccagaagagcctctccctgagcctcggctagtaa

SEQ ID NO: 1575 - DNA, 1326 bp, Artificial Sequence; identical to SEQ ID NO: 1574
  21H6-H3L2 heavy chain DNA sequence

SEQ ID NO: 1576 - DNA, 1326 bp, Artificial Sequence; identical to SEQ ID NO: 1574
  21H6-H3L3 heavy chain DNA sequence

SEQ ID NO: 1577 - DNA, 1326 bp, Artificial Sequence; identical to SEQ ID NO: 1574
  21H6-H3L4 heavy chain DNA sequence

SEQ ID NO: 1578 - DNA, 1326 bp, Artificial Sequence
  21H6-H4L1 heavy chain DNA sequence
caggtgcaactcgtccagtcagggtccgagctgaagaaacccggagcgtccgtgaaggtgtcctgtaaagcctctggctacacattcaccatattcgggatgaactgggtgcgtcaggccccagggcagggattagagtggatgggttgggtgaacacctacacaggggagccaacttacgcccaggggttcacgggcagatttgtatttagcctcgacacctccgtttcaatggcctatctccagatttcaagccttaaagctgaggacactgctgtgtactactgcgcccgcggttggtttgcatactggggccagggaacccttgtcaccgtgtcttccgctagcaccaagggccccagcgtgtttcctctcgctccctgcagccggagcacatccgagagcaccgctgctctgggctgtctcgtgaaggactacttccctgaacccgtcaccgtcagctggaatagcggcgccctgacatccggcgtccacacattccccgctgtcctgcagagcagcggcctgtacagcctgagctccgtggtcaccgtgcctagcagcagcctgggaacaaagacctacacctgcaacgtggaccataagccctccaacaccaaggtggacaagcgggtggaatccaagtatggacccccctgtcctccttgccctgctcctgaatttctcggaggcccctccgtcttcctgtttccccccaagcccaaggacaccctgatgatctcccggacacccgaagtcacctgcgtcgtggtggatgtcagccaggaagatcccgaggtgcagttcaactggtacgtggacggagtggaggtgcataacgccaaaaccaagcccagggaagagcagttcaacagcacctatcgggtcgtgtccgtgctcaccgtcctgcatcaggattggctcaacggcaaggagtacaagtgcaaggtgtccaacaagggcctgccctcctccatcgagaagaccatctccaaggctaagggccaacctcgggagccccaagtgtataccctccctcccagccaggaggagatgaccaagaatcaagtgagcctgacctgcctcgtgaagggattttacccctccgacatcgctgtggaatgggaaagcaatggccaacctgagaacaactacaagaccacaccccccgtgctggactccgatggctccttcttcctgtacagcaggctgaccgtggacaaatcccggtggcaagagggaaacgtgttcagctgctccgtgatgcacgaggctctccacaaccactacacccagaagagcctctccctgagcctcggctagtaa

SEQ ID NO: 1579 - DNA, 1326 bp, Artificial Sequence; identical to SEQ ID NO: 1578
  21H6-H4L2 heavy chain DNA sequence

SEQ ID NO: 1580 - DNA, 1326 bp, Artificial Sequence; identical to SEQ ID NO: 1578
  21H6-H4L3 heavy chain DNA sequence

SEQ ID NO: 1581 - DNA, 1326 bp, Artificial Sequence; identical to SEQ ID NO: 1578
  21H6-H4L4 heavy chain DNA sequence

SEQ ID NO: 1582 - DNA, 1326 bp, Artificial Sequence
  21H6-H5L1 heavy chain DNA sequence
cagatccagttggtccagtccggaagtgagctgaagaagcctggtgccagtgtcaaagtttcctgcaaagcctctggatataccttcaccattttcggtatgaactgggtccgacaagctccggggcaggggctcgaatggatggggtgggtgaatacatacacaggcgaaccaacatacgcacagggatttacaggtcggttcgtcttttccctggacacatctgtttccatggcctatctgcagatctctagcctgaaggctgaagataccgccgtatatttctgtgcacgggggtggttcgcctactgggggcagggcacccttgtgactgtgtctagcgctagcaccaagggccccagcgtgtttcctctcgctccctgcagccggagcacatccgagagcaccgctgctctgggctgtctcgtgaaggactacttccctgaacccgtcaccgtcagctggaatagcggcgccctgacatccggcgtccacacattccccgctgtcctgcagagcagcggcctgtacagcctgagctccgtggtcaccgtgcctagcagcagcctgggaacaaagacctacacctgcaacgtggaccataagccctccaacaccaaggtggacaagcgggtggaatccaagtatggacccccctgtcctccttgccctgctcctgaatttctcggaggcccctccgtcttcctgtttccccccaagcccaaggacaccctgatgatctcccggacacccgaagtcacctgcgtcgtggtggatgtcagccaggaagatcccgaggtgcagttcaactggtacgtggacggagtggaggtgcataacgccaaaaccaagcccagggaagagcagttcaacagcacctatcgggtcgtgtccgtgctcaccgtcctgcatcaggattggctcaacggcaaggagtacaagtgcaaggtgtccaacaagggcctgccctcctccatcgagaagaccatctccaaggctaagggccaacctcgggagccccaagtgtataccctccctcccagccaggaggagatgaccaagaatcaagtgagcctgacctgcctcgtgaagggattttacccctccgacatcgctgtggaatgggaaagcaatggccaacctgagaacaactacaagaccacaccccccgtgctggactccgatggctccttcttcctgtacagcaggctgaccgtggacaaatcccggtggcaagagggaaacgtgttcagctgctccgtgatgcacgaggctctccacaaccactacacccagaagagcctctccctgagcctcggctagtaa

SEQ ID NO: 1583 - DNA, 1326 bp, Artificial Sequence; identical to SEQ ID NO: 1582
  21H6-H5L2 heavy chain DNA sequence

SEQ ID NO: 1584 - DNA, 1326 bp, Artificial Sequence; identical to SEQ ID NO: 1582
  21H6-H5L3 heavy chain DNA sequence

SEQ ID NO: 1585 - DNA, 1326 bp, Artificial Sequence; identical to SEQ ID NO: 1582
  21H6-H5L4 heavy chain DNA sequence

SEQ ID NO: 1586 - DNA, 1326 bp, Artificial Sequence
  21H6-H6L1 heavy chain DNA sequence
cagatccagctggtccagagtggctccgagctgaaaaagcctggagcttctgtgaaagtctcctgcaaagcttctggctacacatttactatctttgggatgaactgggtaaggcaggccccaggccaaggactggagtggatgggctgggttaatacctacacaggcgagcccacgtacgctgacgacttcacagggaggtttgtgttttccctggatacctccgttagcatggcctatttgcagattagttccctgaaggcagaggatactgccgtgtacttttgtgcacgaggatggtttgcctattggggccagggtaccttggtgaccgtctccagcgctagcaccaagggccccagcgtgtttcctctcgctccctgcagccggagcacatccgagagcaccgctgctctgggctgtctcgtgaaggactacttccctgaacccgtcaccgtcagctggaatagcggcgccctgacatccggcgtccacacattccccgctgtcctgcagagcagcggcctgtacagcctgagctccgtggtcaccgtgcctagcagcagcctgggaacaaagacctacacctgcaacgtggaccataagccctccaacaccaaggtggacaagcgggtggaatccaagtatggacccccctgtcctccttgccctgctcctgaatttctcggaggcccctccgtcttcctgtttccccccaagcccaaggacaccctgatgatctcccggacacccgaagtcacctgcgtcgtggtggatgtcagccaggaagatcccgaggtgcagttcaactggtacgtggacggagtggaggtgcataacgccaaaaccaagcccagggaagagcagttcaacagcacctatcgggtcgtgtccgtgctcaccgtcctgcatcaggattggctcaacggcaaggagtacaagtgcaaggtgtccaacaagggcctgccctcctccatcgagaagaccatctccaaggctaagggccaacctcgggagccccaagtgtataccctccctcccagccaggaggagatgaccaagaatcaagtgagcctgacctgcctcgtgaagggattttacccctccgacatcgctgtggaatgggaaagcaatggccaacctgagaacaactacaagaccacaccccccgtgctggactccgatggctccttcttcctgtacagcaggctgaccgtggacaaatcccggtggcaagagggaaacgtgttcagctgctccgtgatgcacgaggctctccacaaccactacacccagaagagcctctccctgagcctcggctagtaa

SEQ ID NO: 1587 - DNA, 1326 bp, Artificial Sequence; identical to SEQ ID NO: 1586
  21H6-H6L2 heavy chain DNA sequence

SEQ ID NO: 1588 - DNA, 1326 bp, Artificial Sequence; identical to SEQ ID NO: 1586
  21H6-H6L3 heavy chain DNA sequence

SEQ ID NO: 1589 - DNA, 1326 bp, Artificial Sequence; identical to SEQ ID NO: 1586
  21H6-H6L4 heavy chain DNA sequence

SEQ ID NO: 1590 - DNA, 660 bp, Artificial Sequence
  21H6-H0L0 light chain DNA sequence
gatgtcgttatgactcagaccccactcacgctctcagtgaccatcggacagcctgccagcatctcatgtaaaagtagtcgcagcctgttagattctgacggcaagacctatctgaactggctgctgcagcgtcctggccagagcccaaaaaggctgatctatctcgtctcaaagctggattcaggagtccccgatcggtttacgggtagcggatctggcaccgacttcacactgaagatttctcgggttgaagccgaagatttgggcgtctactattgctggcaaggaacacacttccctcagacctttggcggcggcacaaagctggaaattaataggaccgtggccgcccccagcgtgttcatcttccctcccagcgacgagcagctgaagtctggcaccgccagcgtggtgtgcctgctgaacaacttctacccccgcgaggccaaggtgcagtggaaggtggacaacgccctgcagagcggcaacagccaggagagcgtgaccgagcaggactccaaggacagcacctacagcctgagcagcaccctgaccctgagcaaggccgactacgagaagcacaaggtgtacgcctgcgaggtgacccaccagggactgtctagccccgtgaccaagagcttcaaccggggcgagtgctaa

SEQ ID NO: 1591 - DNA, 660 bp, Artificial Sequence
  21H6-H1L1 light chain DNA sequence
gatatagtgatgacacagacccccctgtctctctcagttacccccggacaacccgcctctatcagttgcaagagtagtcgctctctgctcgattccgacggaaagacttatctgaattggtatttacaaaaacctgggcagagtccccagcgccttatatatctcgtgtccaaactcgatagcggcgtgcctgaccggttcagcggttcaggctccgggaccgactttacactgaagattagtagggtcgaggcagaagacgtcggtgtttattactgttggcagggcacccatttccctcagacgtttggcggaggtaccaaggtagagataaagaggaccgtggccgcccccagcgtgttcatcttccctcccagcgacgagcagctgaagtctggcaccgccagcgtggtgtgcctgctgaacaacttctacccccgcgaggccaaggtgcagtggaaggtggacaacgccctgcagagcggcaacagccaggagagcgtgaccgagcaggactccaaggacagcacctacagcctgagcagcaccctgaccctgagcaaggccgactacgagaagcacaaggtgtacgcctgcgaggtgacccaccagggactgtctagccccgtgaccaagagcttcaaccggggcgagtgctaa

SEQ ID NO: 1592 - DNA, 660 bp, Artificial Sequence
  21H6-H1L2 light chain DNA sequence
gatgtggtgatgactcagactcctctgagcctgtccgtgaccccaggacaacctgcttccatttcctgtaaatcctcccgttccttattggatagcgacgggaagacatacctgaactggctgctgcagaaacccgggcagtccccgcagagattaatatatctggtatctaagctggatagtggtgtaccagatcggtttagcggatccggctcaggtaccgacttcacgctcaagatctccagggtggaggctgaggatgtaggagtatactactgttggcaggggacccattttcctcaaacatttggggggggaacaaaggtagagatcaagaggaccgtggccgcccccagcgtgttcatcttccctcccagcgacgagcagctgaagtctggcaccgccagcgtggtgtgcctgctgaacaacttctacccccgcgaggccaaggtgcagtggaaggtggacaacgccctgcagagcggcaacagccaggagagcgtgaccgagcaggactccaaggacagcacctacagcctgagcagcaccctgaccctgagcaaggccgactacgagaagcacaaggtgtacgcctgcgaggtgacccaccagggactgtctagccccgtgaccaagagcttcaaccggggcgagtgctaa

SEQ ID NO: 1593 - DNA, 660 bp, Artificial Sequence
  21H6-H1L3 light chain DNA sequence
gatgtggtgatgactcagtctccactcagcctgcctgtaaccttagggcaacctgcctccatcagttgtcgctccagtcgttctctgctggattcagacggtaaaacctatctgaattggttccagcagcgtccaggacagtctccacgccgactgatatatctcgtgagtaagttggattcaggcgtgcccgatcgcttcagtggcagcgggtctgggactgactttaccctgaaaatatcccgcgtggaggcggaagatgtcggggtatattactgttggcagggtacacatttcccacagacattcgggggaggcactaaggtggaaattaaaaggaccgtggccgcccccagcgtgttcatcttccctcccagcgacgagcagctgaagtctggcaccgccagcgtggtgtgcctgctgaacaacttctacccccgcgaggccaaggtgcagtggaaggtggacaacgccctgcagagcggcaacagccaggagagcgtgaccgagcaggactccaaggacagcacctacagcctgagcagcaccctgaccctgagcaaggccgactacgagaagcacaaggtgtacgcctgcgaggtgacccaccagggactgtctagccccgtgaccaagagcttcaaccggggcgagtgctaa

SEQ ID NO: 1594 - DNA, 660 bp, Artificial Sequence
  21H6-H1L4 light chain DNA sequence
gacgtggtgatgacacagagcccgctgtctctcccggtaacgctgggccagccggcgtctattagctgtaagagtagccgaagtctccttgatagcgacggaaaaacctatctgaactggcttcagcaacgccctgggcagtccccccgccgcctgatttatctggtgtccaaactggacagcggcgtgcccgacaggttctccgggagcggtagcggtactgactttacgctcaagatttcccgcgtggaggccgaggatgtcggggtatattactgctggcaggggacgcattttccgcagacctttggcggaggcaccaaagtggagatcaaaaggaccgtggccgcccccagcgtgttcatcttccctcccagcgacgagcagctgaagtctggcaccgccagcgtggtgtgcctgctgaacaacttctacccccgcgaggccaaggtgcagtggaaggtggacaacgccctgcagagcggcaacagccaggagagcgtgaccgagcaggactccaaggacagcacctacagcctgagcagcaccctgaccctgagcaaggccgactacgagaagcacaaggtgtacgcctgcgaggtgacccaccagggactgtctagccccgtgaccaagagcttcaaccggggcgagtgctaa

SEQ ID NO: 1595 - DNA, 660 bp, Artificial Sequence; identical to SEQ ID NO: 1591
  21H6-H2L1 light chain DNA sequence

SEQ ID NO: 1596 - DNA, 660 bp, Artificial Sequence; identical to SEQ ID NO: 1592
  21H6-H2L2 light chain DNA sequence

SEQ ID NO: 1597 - DNA, 660 bp, Artificial Sequence; identical to SEQ ID NO: 1593
  21H6-H2L3 light chain DNA sequence

SEQ ID NO: 1598 - DNA, 660 bp, Artificial Sequence; identical to SEQ ID NO: 1594
  21H6-H2L4 light chain DNA sequence

SEQ ID NO: 1599 - DNA, 660 bp, Artificial Sequence; identical to SEQ ID NO: 1591
  21H6-H3L1 light chain DNA sequence

SEQ ID NO: 1600 - DNA, 660 bp, Artificial Sequence; identical to SEQ ID NO: 1592
  21H6-H3L2 light chain DNA sequence

SEQ ID NO: 1601 - DNA, 660 bp, Artificial Sequence; identical to SEQ ID NO: 1593
  21H6-H3L3 light chain DNA sequence

SEQ ID NO: 1602 - DNA, 660 bp, Artificial Sequence; identical to SEQ ID NO: 1594
  21H6-H3L4 light chain DNA sequence

SEQ ID NO: 1603 - DNA, 660 bp, Artificial Sequence; identical to SEQ ID NO: 1591
  21H6-H4L1 light chain DNA sequence

SEQ ID NO: 1604 - DNA, 660 bp, Artificial Sequence; identical to SEQ ID NO: 1592
  21H6-H4L2 light chain DNA sequence

SEQ ID NO: 1605 - DNA, 660 bp, Artificial Sequence; identical to SEQ ID NO: 1593
  21H6-H4L3 light chain DNA sequence

SEQ ID NO: 1606 - DNA, 660 bp, Artificial Sequence; identical to SEQ ID NO: 1594
  21H6-H4L4 light chain DNA sequence

SEQ ID NO: 1607 - DNA, 660 bp, Artificial Sequence; identical to SEQ ID NO: 1591
  21H6-H5L1 light chain DNA sequence

SEQ ID NO: 1608 - DNA, 660 bp, Artificial Sequence; identical to SEQ ID NO: 1592
  21H6-H5L2 light chain DNA sequence

SEQ ID NO: 1609 - DNA, 660 bp, Artificial Sequence; identical to SEQ ID NO: 1593
  21H6-H5L3 light chain DNA sequence

SEQ ID NO: 1610 - DNA, 660 bp, Artificial Sequence; identical to SEQ ID NO: 1594
  21H6-H5L4 light chain DNA sequence

SEQ ID NO: 1611 - DNA, 660 bp, Artificial Sequence; identical to SEQ ID NO: 1591
  21H6-H6L1 light chain DNA sequence

SEQ ID NO: 1612 - DNA, 660 bp, Artificial Sequence; identical to SEQ ID NO: 1592
  21H6-H6L2 light chain DNA sequence

SEQ ID NO: 1613 - DNA, 660 bp, Artificial Sequence; identical to SEQ ID NO: 1593
  21H6-H6L3 light chain DNA sequence

SEQ ID NO: 1614 - DNA, 660 bp, Artificial Sequence; identical to SEQ ID NO: 1594
  21H6-H6L4 light chain DNA sequence

SEQ ID NO: 1615 - protein, 329 aa, Artificial Sequence
  Exemplary hIgG1(KEM) Fc region
ASTKGPSVFPLAPSSKSTSGGTAALGCLVKDYFPEPVTVSWNSGALTSGVHTFPAVLQSSGLYSLSSVVTVPSSSLGTQTYICNVNHKPSNTKVDKKVEPKSCDKTHTCPPCPAPELLGGPSVFLFPPKPKDTLMISRTPEVTCVVVDVSHEDPEVKFNWYVDGVEVHNAKTKPREEQYNSTYRVVSVLTVLHQDWLNGKEYKCKVSNKALPAPIEKTISKAKGQPREPQVYTLPPSREEMTKNQVSLTCLVKGFYPSDIAVEWESNGQPENNYKTTPPVLDSDGSFFLYSKLTVDKSRWQQGNVFSCSVMHEALHNHYTQKSLSLSPG

SEQ ID NO: 1616 - protein, 329 aa, Artificial Sequence
  Exemplary hIgG1(REM) Fc region
ASTKGPSVFPLAPSSKSTSGGTAALGCLVKDYFPEPVTVSWNSGALTSGVHTFPAVLQSSGLYSLSSVVTVPSSSLGTQTYICNVNHKPSNTKVDKRVEPKSCDKTHTCPPCPAPELLGGPSVFLFPPKPKDTLMISRTPEVTCVVVDVSHEDPEVKFNWYVDGVEVHNAKTKPREEQYNSTYRVVSVLTVLHQDWLNGKEYKCKVSNKALPAPIEKTISKAKGQPREPQVYTLPPSREEMTKNQVSLTCLVKGFYPSDIAVEWESNGQPENNYKTTPPVLDSDGSFFLYSKLTVDKSRWQQGNVFSCSVMHEALHNHYTQKSLSLSPG

SEQ ID NO: 1617 - protein, 329 aa, Artificial Sequence
  Exemplary hIgG1(LALAPGv2) Fc region
ASTKGPSVFPLAPSSKSTSGGTAALGCLVKDYFPEPVTVSWNSGALTSGVHTFPAVLQSSGLYSLSSVVTVPSSSLGTQTYICNVNHKPSNTKVDKKVEPKSCDKTHTCPPCPAPEAAGGPSVFLFPPKPKDTLMISRTPEVTCVVVDVSHEDPEVKFNWYVDGVEVHNAKTKPREEQYNSTYRVVSVLTVLHQDWLNGKEYKCKVSNKALGAPIEKTISKAKGQPREPQVYTLPPSREEMTKNQVSLTCLVKGFYPSDIAVEWESNGQPENNYKTTPPVLDSDGSFFLYSKLTVDKSRWQQGNVFSCSVMHEALHNHYTQKSLSLSPG

SEQ ID NO: 1618 - protein, 492 aa, Homo sapiens
MEPSSKKLTGRLMLAVGGAVLGSLQFGYNTGVINAPQKVIEEFYNQTWVHRYGESILPTTLTTLWSLSVAIFSVGGMIGSFSVGLFVNRFGRRNSMLMMNLLAFVSAVLMGFSKLGKSFEMLILGRFIIGVYCGLTTGFVPMYVGEVSPTALRGALGTLHQLGIVVGILIAQVFGLDSIMGNKDLWPLLLSIIFIPALLQCIVLPFCPESPRFLLINRNEENRAKSVLKKLRGTADVTHDLQEMKEESRQMMREKKVTILELFRSPAYRQPILIAVVLQLSQQLSGINAVFYYSTSIFEKAGVQQPVYATIGSGIVNTAFTVVSLFVVERAGRRTLHLIGLAGMAGCAILMTIALALLEQLPWMSYLSIVAIFGFVAFFEVGPGPIPWFIVAELFSQGPRPAAIAVAGFSNWTSNFIVGMCFQYVEQLCGPYVFIIFTVLLVLFFIFTYFKVPETKGRTFDEIASGFRQGGASQSDKTPEELFHPLGADSQV
